(19) United States
(12) Patent Application Publication
(10) Pub. No.: US 2021/0123069 A1
(43) Pub. Date: Apr. 29, 2021

(54) CONTROL OF INSECT PESTS USING RNA MOLECULES

(71) Applicant: DEVGEN NV, Gent - Zwijnaarde (BE)

(72) Inventors: Lien DE SCHRIJVER, Gent - Zwijnaarde (BE); Kaat CAPPELLE, Gent - Zwijnaarde (BE); Lies DEGRAVE, Gent - Zwijnaarde (BE); Yann NAUDET, Gent - Zwijnaarde (BE); Steffy DENORME, Gent - Zwijnaarde (BE)

(73) Assignee: DEVGEN NV, Gent - Zwijnaarde (BE)

(21) Appl. No.: 17/051,048

(22) PCT Filed: Apr. 17, 2019
(86) PCT No.: PCT/EP2019/060009

§ 371 Date: Oct. 27, 2020

Related U.S. Application Data
(60) Provisional application No. 62/663,501, filed on Apr. 27, 2018.

(51) Int. Cl. C12N 15/82; A01N 63/60

(52) U.S. Cl. CPC C12N 15/8218; A01N 63/60; C12N 15/8286

(57) ABSTRACT

Disclosed are double stranded RNA molecules that are toxic to flea beetles, particularly the flea beetle species Psylliodes chrysocephala, Phyllotreta nemorum, Phyllotreta striolata, Phyllotreta armoraciae, and Phyllotreta cruciferae. In particular, interfering RNA molecules capable of interfering with pest target genes and that are toxic to the target pest are provided. Further, methods of making and using the interfering RNA, for example in transgenic plants or as the active ingredient in a composition, to confer protection from insect damage are disclosed.

[0001] The invention relates generally to the control of pests that cause damage to crop plants by their feeding activities, and more particularly to the control of beetles by compositions comprising interfering RNA molecules. The invention further relates to the compositions and to methods of using such compositions comprising the interfering RNA molecules.

### BACKGROUND

[0002] Flea beetles are members of the leaf beetle family Chrysomelidae, sub family Galerucinae, in the tribe Alticini. Adult flea beetles feed externally on plants, eating the surface of leaves, stems, and petals. The flea beetles Psylliodes chrysocephala, Phyllotreta cruciferae, Phyllotreta nemorum, and Phyllotreta striolata (Coleoptera: Chrysomelidae) are significant pests of crops in the Brassicaceae family, including Brussel sprouts, kale, broccoli, cauliflower, and canola (Brassica rapa and Brassica napus). Flea beetles are primarily controlled by application of chemical insecticides, however many effective insecticides, such as parathion-ethyl, parathion-methyl and gamma-HCH, are no longer allowed in many areas of the world due to environmental, human safety, and regulatory issues. Additionally, other chemical insecticides have been shown not to be sufficiently efficacious against at least some species of flea beetle (Andersen et al., 2006, J Econ Entomol, 99(3): 803-810; Tansey et al., 2009, J Appl Entomol, 133: 201-209). Finally, flea beetle resistance to the remaining effective chemical insecticides is a significant concern. Therefore, novel compositions for control of flea beetles are urgently needed.

[0003] RNA interference (RNAi) occurs when an organism recognizes double-stranded RNA (dsRNA) molecules and hydrolyzes them. The resulting hydrolysis products are small RNA fragments of about 19-24 nucleotides in length, called small interfering RNAs (siRNAs). The siRNAs then diffuse or are carried throughout the organism, including across cellular membranes, where they hybridize to mRNAs (or other RNAs) and cause hydrolysis of the RNA. Interfering RNAs are recognized by the RNA interference silencing complex (RISC) into which an effector strand (or “guide strand”) of the RNA is loaded. This guide strand acts as a template for the recognition and destruction of the duplex sequences. This process is repeated each time the siRNA hybridizes to its complementary-RNA target, effectively preventing those mRNAs from being translated, and thus “silencing” the expression of specific genes from which the mRNAs were transcribed.

[0004] RNAi has been found to be useful for insect control of certain insect pests. RNAi strategies typically employ a synthesized, non-naturally occurring “interfering RNA”, or “interfering RNA molecule” which typically comprises at least a RNA fragment against a target gene, a spacer sequence, and a second RNA fragment which is complementary to the first, so that a double-stranded RNA structure can be formed. This non-natural double-stranded RNA molecule takes advantage of the native RNAi pathways in the insect to trigger down-regulation of target genes that may lead to the cessation of feeding and/or growth and may result in the death of the insect pest.

[0005] Although it is known in the literature that RNAi strategies focused on target genes can lead to an insecticidal effect in Diabrotica species, it is also known that not every target sequence is successful, and that an insecticidal effect cannot be predicted. The overwhelming majority of sequences complementary to corn rootworm DNAs are not lethal in species of corn rootworm when used as dsRNA or siRNA. For example, Baum et al. ((2007) Nature Biotechnology 25:1322-1326), describe the effects of inhibiting several WCR gene targets by RNAi. The authors report that of 290 dsRNAs tested, only 125 showed significant larval mortality and/or stunting at the dsRNA concentration of 5.2 ng/cm². Additionally, the dosage or quantity of a given dsRNA molecule required to confer significant insecticidal activity needs to be considered for the dsRNA molecule to be of commercial value for crop protection.

[0006] There is an ongoing need for compositions containing insecticidal active ingredients, and for methods of using such compositions, for instance for use in crop protection or insect-mediated disease control. Novel compositions are required to overcome the problem of resistance to existing insecticides and/or to help mitigate the development of resistance to existing transgenic plant approaches. Ideally such compositions have a high toxicity and are effective when ingested orally by the target pest and have applicability for use against both the larval and adult stages of the pest insect. Thus any invention which provided compositions in which any of these properties was enhanced would represent a step forward in the art.

### SUMMARY

[0007] The needs outlined above are met by the invention which, in various embodiments, provides new methods of controlling economically important insect pests. The invention in part comprises a method of inhibiting expression of one or more target genes and proteins in Coleopteran insect pests. Specifically, the invention comprises methods of modulating expression of one or more target genes in a species of insect that causes cessation of feeding, growth, development and reproduction, and eventually results in the death of the insect, where the insect is a flea beetle species of the Alticini tribe. In some embodiments, the insect is a species of a genus selected from the group consisting of the genera Altica, Anthobiodes, Aphthona, Aphthonaltica, Aphthonoides, Apteopeda, Argopistes, Argopus, Arrhenocoela, Batophila, Blepharida, Chaetocnema, Clitea, Crepidodera, Derocrepis, Dibolia, Disonycha, Epitrix, Hermipyxis, Hermaeophaga, Hespera, Hippuriphila, Horaia, Hyphasis, Lipromima, Liprus, Longitarsus, Luperomorpha, Lythraria, Manobia, Mantura, Meishania, Minota, Mniophila, Neicrepidodera, Nonarthra, Novofoudrasia, Ochrosis, Oedionychis, Oglobinia, Omeisphaera, Ophrida, Orestia, Paragopus, Pentamesa, Philopona, Phygasia, Phyllotreta, Podagrica, Podagricomela, Podontia, Pseudodera, Psylliodes, Sangariola, Sinaltica, Sphaeroderma, Systena, Trachyaphthona, Xuthea, and Zipangia. In embodiments, the insect is a species selected from the group consisting of Altica ambiens (alder flea beetle), Altica canadensis (prairie flea beetle), Altica chalybaea (grape flea beetle), Altica prasina (poplar flea beetle), Altica rosae (rose flea beetle), Altica sylvia (blueberry flea beetle), Altica ulmi (elm flea beetle), Chaetocnema pulicaria (corn flea beetle), Chaetocnema conofinis (sweet potato flea beetle), Epitrix cucumeris (potato flea beetle), Systena blanda (palestripped flea beetle), and Systena frontalis (redheaded flea beetle). In embodiments, the insect is a species selected from the group consisting of Phyllotreta armoraciae (horseradish flea beetle), Phyllotreta cruciferae (canola flea beetle), Phyllotreta pusilla (western black flea beetle), Phyllotreta nemorum (striped turnip flea beetle), Phyllotreta atra (turnip flea beetle), Phyllotreta robusta (garden flea beetle), Phyllotreta striolata (striped flea beetle), Phyllotreta undulata, Psylliodes chrysocephala, and Psylliodes punctulata (hop flea beetle), and related species. The method comprises introduction of an interfering RNA molecule comprising a double-stranded RNA (dsRNA) or its modified forms such as small interfering RNA (siRNA) sequences, into cells or into the extracellular environment, such as the midgut, within a pest insect body wherein the dsRNA or siRNA enters the cells and inhibits expression of at least one or more target genes and wherein inhibition of the one or more target genes exerts a deleterious effect upon the pest insect. The interfering RNA molecule is non-naturally occurring. It is specifically contemplated that the methods and compositions of the invention will be useful in limiting or eliminating pest insect infestation in or on any plant by providing one or more compositions comprising interfering RNA molecules comprising dsRNA or siRNA molecules in the diet of the pest. The invention also provides interfering RNA molecules that when delivered to an insect pest inhibits, through a toxic effect, the ability of the insect pest to survive, grow, feed and/or reproduce, or to limit pest related damage or loss to crop plants. Such delivery may be through production of the interfering RNA in a transgenic plant, for example canola, or by topically applying a composition comprising the interfering RNA to a plant or plant seed, such as a canola plant or canola seed. Delivery may further be through contacting the insect with the interfering RNA, such as when the insect feeds on plant material comprising the interfering RNA, either because the plant material is expressing the interfering RNA through a transgenic approach, or because the plant material is coated with a composition comprising the interfering RNA. The interfering RNA may also be provided in an artificial insect diet which the insect then contacts by feeding. The interfering RNA molecule comprises a nucleotide sequence that is complementary to a nucleotide sequence of a mRNA transcribable from a target gene or a portion of a nucleotide sequence of a mRNA transcribable from a target gene of the pest insect and therefore inhibits expression of the target gene, which causes cessation of feeding, growth, development, reproduction and eventually results in death of the pest insect. The invention is further drawn to nucleic acid constructs, nucleic acid molecules and recombinant vectors that comprise or encode at least a fragment of one strand of an interfering RNA molecule of the invention. The invention also provides chimeric nucleic acid molecules comprising an antisense strand of a dsRNA of the interfering RNA operably associated with a plant microRNA precursor molecule. The invention also provides artificial plant microRNA precursors comprising an antisense strand of a dsRNA of an interfering RNA of the invention.

[0008] The invention further provides an interfering ribonucleic acid (RNA) molecule wherein the RNA comprises at least one dsRNA wherein the dsRNA is a region of double-stranded RNA comprising annealed complementary strands, one strand of which comprises a sequence of at least 19 contiguous nucleotides which is at least partially complementary to a target nucleotide sequence within a flea beetle target gene, and (i) is at least 85% identical to at least a 19 contiguous nucleotide fragment of SEQ ID NO: 253-378 or SEQ ID NO: 616-701, or the complement thereof; or (ii) comprises at least a 19 contiguous nucleotide fragment of SEQ ID NO: 253-378 or SEQ ID NO: 616-701, or the complement thereof; or (iii) comprises at least a 19 contiguous nucleotide fragment of a nucleotide sequence encoding an amino acid sequence encoded by SEQ ID NO: 253-378 or SEQ ID NO: 616-701, or the complement thereof, wherein the interfering RNA molecule has insecticidal activity on a Coleopteran plant pest. In some embodiments, the interfering molecule may comprise at least two dsRNAs, wherein each dsRNA comprises a sequence of nucleotides which is at least partially complementary to a target nucleotide sequence within the target gene. In further embodiments, each of the dsRNAs may comprise a different sequence of nucleotides which is complementary to a different target nucleotide sequence within the target gene.

[0009] The invention further provides compositions comprising one or more interfering RNA molecules comprising two or more of dsRNA molecules, wherein the two or more RNA molecules each comprise a different antisense strand, or comprising two or more nucleic acid constructs or nucleic acid molecules or artificial plant microRNA precursors of the invention.

[0010] The invention further provides insecticidal compositions for inhibiting the expression of a Coleopteran insect gene that comprises a dsRNA of the invention and an agriculturally acceptable carrier. In one embodiment, inhibition of the expression of a flea beetle gene described here leads to cessation of feeding and growth and ultimately results in the death of the flea beetle.

[0011] The invention is further drawn to transgenic plants which produce one or more interfering RNA molecules of the invention that are self-protected from insect feeding damage and to methods of using the plants alone or in combination with other insect control strategies to confer maximal insect control capabilities. Plants and/or plant parts producing one or more interfering RNA molecules of the invention or treated with a composition comprising one or more interfering RNA molecules of the invention are highly resistant to insect pest infestation. For example, economically important Coleopteran pests can be controlled by a plant that produces an interfering RNA molecule of the invention or by a plant or plant seed that is treated with a composition comprising an interfering RNA molecule of the invention.

[0012] The invention also provides a method of controlling a Coleopteran insect plant pest comprising contacting the Coleopteran insect with a nucleic acid molecule that is or is capable of producing an interfering RNA of the invention for inhibiting expression of a gene in the Coleopteran insect thereby controlling the Coleopteran insect.

[0013] In other aspects, the invention provides a method of reducing a flea beetle population on a transgenic plant expressing a second insecticidal agent, for example an insecticidal protein, in addition to an interfering RNA of the invention capable of inhibiting expression of an target gene in a flea beetle, thereby reducing the flea beetle population. The second insecticidal agent may be an insecticidal protein derived from Bacillus thuringiensis. A B. thuringiensis insecticidal protein can be any of a number of insecticidal proteins including but not limited to a Cry1 protein, a Cry3 protein, a Cry7 protein, a Cry8 protein, a Cry11 protein, a Cry22 protein, a Cry 23 protein, a Cry 36 protein, a Cry37 protein, a Cry34 protein together with a Cry35 protein, a binary insecticidal protein CryET33 and CryET34, a binary insecticidal protein TIC100 and TIC101, a binary insecticidal protein PS14961, a VIP, a TIC900 or related protein, a TIC901, TIC1201, TIC407, TIC417, a modified Cry3A protein, or hybrid proteins or chimeras made from any of the preceding insecticidal proteins. The insecticidal protein may be any other insecticidal protein derived from B. thuringiensis known in the art to be insecticidal (see for example, Palma et al., 2014, Toxins 6: 3296-3325, and references within; Berry and Crickmore, 2017, J of Invertebrate Pathology 142: 16-22, and reference within).

[0014] In other embodiments, the second insecticidal agent may be derived from sources other than B. thuringiensis. The second insecticidal agent can be an agent selected from the group comprising a patatin, a protease, a protease inhibitor, a urease, an alpha-amylase inhibitor, a pore-forming protein, a chitinase, a lectin, an engineered antibody or antibody fragment, a Bacillus cereus insecticidal protein, a Xenorhabdus spp. (such as X. nematophila or X. bovienii) insecticidal protein, a Photorhabdus spp. (such as P. luminescens or P. asymobiotica) insecticidal protein, a Brevibacillus laterosporous insecticidal protein, a Lysinibacillus sphearicus insecticidal protein, a Chromobacterium spp. insecticidal protein, a Yersinia entomophaga insecticidal protein, a Paenibacillus popiliae insecticidal protein, a Clostridium spp. (such as C. bifermentans) insecticidal protein, and a lignin. In other embodiments, the second agent may be at least one insecticidal protein derived from an insecticidal toxin complex (Tc) from Photorhabdus, Xenorhabus, Serratia, or Yersinia. In other embodiments, the insecticidal protein may be an ADP-ribosyltransferase derived from an insecticidal bacteria, such as Photorhabdus spp. In other embodiments, the insecticidal protein may be a VIP protein, such as VIP1 or VIP2 from B. cereus. In still other embodiments, the insecticidal protein may be a binary toxin derived from an insecticidal bacteria, such as ISP1A and ISP2A from B. laterosporous or BinA and BinB from L. sphaericus. In still other embodiments, the insecticidal protein may be engineered or may be a hybrid or chimera of any of the preceding insecticidal proteins.

[0015] In other aspects, the invention provides a method of reducing resistance development in a flea beetle population to an interfering RNA of the invention, the method comprising expressing in a transgenic plant fed upon by the flea beetle population an interfering RNA of the invention that is capable of inhibiting expression of a target gene in a larval and adult flea beetle, thereby reducing resistance development in the flea beetle population compared to a flea beetle population exposed to an interfering RNA capable of inhibiting expression of a flea beetle gene described herein in only the larval stage or adult stage of a flea beetle.

[0016] In other aspects, the invention provides a method of reducing the level of a target RNA transcribable from a flea beetle gene described herein in a flea beetle comprising contacting the flea beetle with a composition comprising an interfering RNA molecule of the invention, wherein the interfering RNA molecule reduces the level of the target RNA in a cell of the flea beetle.

[0017] In still other aspects, the invention provides a method of conferring flea beetle tolerance or Coleopteran plant pest tolerance to a plant, or part thereof, comprising introducing into the plant, or part thereof, an interfering RNA molecule, a dsRNA molecule, a nucleic acid construct, a chimeric nucleic acid molecule, an artificial plant microRNA precursor molecule and/or a composition of the invention, thereby conferring to the plant or part thereof tolerance to the flea beetle or Coleopteran plant pest.

[0018] In further aspects, the invention provides a method of reducing damage to the plant fed upon by a flea beetle, comprising introducing into cells of the plant an interfering RNA molecule, a dsRNA, a nucleic acid molecule, a nucleic acid construct, a chimeric nucleic acid molecule, an artificial plant microRNA precursor molecule and/or a composition of the invention, thereby reducing damage to the plant fed upon by a flea beetle.

[0019] In other aspects, the invention provides a method of producing a transgenic plant cell having toxicity to a Coleopteran insect, comprising introducing into a plant cell an interfering RNA molecule, a dsRNA, a nucleic acid molecule, a nucleic acid construct, a chimeric nucleic acid molecule, an artificial plant microRNA precursor molecule and/or a composition of the invention, thereby producing the transgenic plant cell having toxicity to the Coleopteran insect compared to a control plant cell.

[0020] In further aspects, the invention provides a method of producing a transgenic plant having enhanced tolerance to Coleopteran insect feeding damage, comprising introducing into a plant an interfering RNA molecule, a dsRNA, a nucleic acid molecule, a nucleic acid construct, a chimeric nucleic acid molecule, an artificial plant microRNA precursor molecule and/or a composition of the invention, thereby producing a transgenic plant having enhanced tolerance to Coleopteran insect feeding damage compared to a control plant.

[0021] In other aspects, the invention provides a method of enhancing control of a Coleopteran insect population comprising providing a transgenic plant or transgenic seed of the invention and applying to the transgenic plant or the transgenic seed a chemical pesticide that is insecticidal to a Coleopteran insect, thereby enhancing control of the Coleopteran insect population.

[0022] In other aspects, the invention provides a method of providing a canola grower with a means of controlling a Coleopteran insect pest population below an economic threshold in a canola crop comprising (a) selling or providing to the grower transgenic canola seed comprising a dsRNA, a nucleic acid molecule, a nucleic acid construct, a chimeric nucleic acid molecule, an artificial plant microRNA precursor molecule and/or a composition of the invention; and (b) advertising to the grower that the transgenic canola seed produces transgenic canola plants capable of controlling a Coleopteran insect pest population.

[0023] In another aspect, the invention provides a method of identifying an orthologous target gene for using as a RNAi strategy for the control of a different Coleopteran plant pest, said method comprising the steps of: a) producing a primer pair that will amplify a target selected from the group comprising or consisting of SEQ ID NO: 1-63 or SEQ ID NO: 442-483, or a complement thereof; b) amplifying an orthologous target gene from a nucleic acid sample of the plant pest using the primer pair of step a); c) identifying a sequence of an orthologous target gene; d) producing an interfering RNA molecule, wherein the RNA comprises at least one dsRNA, wherein the dsRNA is a region of double-stranded RNA comprising annealed complementary strands, one strand of which comprises a sequence of at least 19 contiguous nucleotides which is at least partially complementary to the orthologous target nucleotide sequence within the target gene; and e) determining if the interfering RNA molecule of step (d) has insecticidal activity on the plant pest. If the interfering RNA has insecticidal activity on the plant pest target gene, an orthologous target gene for using in the control of a plant pest has been identified.

[0024] These and other aspects of the invention are set forth in more detail in the description of the invention below.

### BRIEF DESCRIPTION OF THE SEQUENCES IN THE SEQUENCE LISTING

[0025] The nucleic acid sequences listed in the accompanying sequence listing are shown using standard letter abbreviations for nucleotide bases, as defined in 37 C.F.R. § 1.822. The nucleic acid and amino acid sequences listed define molecules (i.e., polynucleotides and polypeptides, respectively) having the nucleotide and amino acid monomers arranged in the manner described. The nucleic acid and amino acid sequences listed also each define a genus of polynucleotides or polypeptides that comprise the nucleotide and amino acid monomers arranged in the manner described. In view of the redundancy of the genetic code, it will be understood that a nucleotide sequence including a coding sequence also describes the genus of polynucleotides encoding the same polypeptide as a polynucleotide consisting of the reference sequence. It will further be understood that an amino acid sequence describes the genus of polynucleotide ORFS encoding that polypeptide.

[0026] Only one strand of each nucleic acid sequence is shown, but the complementary strand is understood as included by any reference to the displayed strand. As the complement and reverse complement of a primary nucleic acid sequence are necessarily disclosed by the primary sequence, the complementary sequence and reverse complementary sequence reference to the nucleic acid sequence, unless it is explicitly stated to be otherwise (or it is clear to be otherwise from the context in which the sequence appears). Furthermore, as it is understood in the art that the nucleotide sequence of an RNA strand is determined by the sequence of the DNA from which it was transcribed (but for the substitution of uracil (U) nucleobases for thymine (T)), an RNA sequence is included by any reference to the DNA sequence encoding it. In the accompanying sequence listing:

[0027] SEQ ID NOs: 1-21 are DNA coding sequences of the 21 Psylloides chrysocephala target genes identified for assaying in the RNAi-based screen for insecticidal activity.

[0028] SEQ ID NOs: 22-42 are DNA coding sequences of the 21 Phyllotreta nemorum target genes identified for assaying in the RNAi-based screen for insecticidal activity.

[0029] SEQ ID NOs: 43-63 are DNA coding sequences of the 21 Phyllotreta striolata target genes identified for assaying in the RNAi-based screen for insecticidal activity.

[0030] SEQ ID NOs: 442-462 are DNA coding sequences of the 21 Phyllotreta armoraciae target genes identified for assaying in the RNAi-based screen for insecticidal activity.

[0031] SEQ ID NOs: 463-483 are DNA coding sequences of the 21 Phyllotreta cruciferae target genes identified for assaying in the RNAi-based screen for insecticidal activity.

[0032] SEQ ID NOs: 64-84 are fragments of DNA coding sequences of P. chrysocephala used to synthesize interfering RNA molecules to test for insecticidal activity in the RNAi-based screen.

[0033] SEQ ID NOs: 85-105 are fragments of DNA coding sequences of P. nemorum used to synthesize interfering RNA molecules to test for insecticidal activity in the RNAi-based screen.

[0034] SEQ ID NOs: 106-126 are fragments of DNA coding sequences of P. striolata used to synthesize interfering RNA molecules to test for insecticidal activity in the RNAi-based screen.

[0035] SEQ ID NOs: 484-506 are fragments of DNA coding sequences of P. armoraciae used to synthesize interfering RNA molecules to test for insecticidal activity in the RNAi-based screen.

[0036] SEQ ID NOs: 507-527 are fragments of DNA coding sequences of P. cruciferae used to synthesize interfering RNA molecules to test for insecticidal activity in the RNAi-based screen.

[0037] SEQ ID NOs: 127-147 are DNA sequences of forward primers and SEQ ID NOs: 190-210 are DNA sequences of the corresponding reverse primers for producing the fragments of SEQ ID NOs: 64-84.

[0038] SEQ ID NOs: 148-168 are DNA sequences of forward primers and SEQ ID NOs: 211-231 are DNA sequences of the corresponding reverse primers for producing the fragments of SEQ ID NOs: 85-105.

[0039] SEQ ID NOs: 169-189 are DNA sequences of forward primers and SEQ ID NOs: 232-252 are DNA sequences of the corresponding reverse primers for producing the fragments of SEQ ID NOs: 106-126.

[0040] SEQ ID NOs: 528-550 are DNA sequences of forward primers and SEQ ID NOs: 572-594 are DNA sequences of the corresponding reverse primers for producing the fragments of SEQ ID NOs: 484-506.

[0041] SEQ ID NOs: 551-571 are DNA sequences of forward primers and SEQ ID NOs: 595-615 are DNA sequences of the corresponding reverse primers for producing the fragments of SEQ ID NOs: 507-527.

[0042] SEQ ID NOs: 253-273 are the sense RNA sequences of the P. chrysocephala DNA coding sequences of SEQ ID NOs: 1-21.

[0043] SEQ ID NOs: 274-294 are the sense RNA sequences of the P. nemorum DNA coding sequences of SEQ ID NOs: 22-42.

[0044] SEQ ID NOs: 295-315 are the sense RNA sequences of the P. striolata DNA coding sequences of SEQ ID NOs: 43-63.

[0045] SEQ ID NOs: 616-636 are the sense RNA sequences of the P. armoraciae DNA coding sequences of SEQ ID NOs: 442-462.

[0046] SEQ ID NOs: 637-657 are the sense RNA sequences of the P. cruciferae DNA coding sequences of SEQ ID NOs: 463-483.

[0047] SEQ ID NOs: 316-336 are the sense RNA sequences of the P. chrysocephala DNA coding sequence fragments of SEQ ID NOs: 64-84.

[0048] SEQ ID NOs: 337-357 are the sense RNA sequences of the P. nemorum DNA coding sequence fragments of SEQ ID NOs: 85-105.

[0049] SEQ ID NOs: 358-378 are the sense RNA sequences of the P. striolata DNA coding sequence fragments of SEQ ID NOs: 106-126.

[0050] SEQ ID NOs: 658-680 are the sense RNA sequences of the P. armoraciae DNA coding sequence fragments of SEQ ID NOs: 484-506.

[0051] SEQ ID NOs: 681-701 are the sense RNA sequences of the P. cruciferae DNA coding sequence fragments of SEQ ID NOs: 507-527.

[0052] SEQ ID NOs: 379-399 are amino acid sequences encoded by the P. chrysocephala DNA coding sequences of SEQ ID Nos: 1-21.

[0053] SEQ ID NOs: 400-420 are amino acid sequences encoded by the P. nemorum DNA coding sequences of SEQ ID Nos: 22-42.

[0054] SEQ ID NOs: 421-440 are amino acid sequences encoded by the Phyllotreta striolata DNA coding sequences of SEQ ID Nos: 43-63.

[0055] SEQ ID NOs: 702-722, are amino acid sequences encoded by the P. armoraciae DNA coding sequence fragments of SEQ ID NOs: 442-462.

[0056] SEQ ID NOs: 723-743 are amino acid sequences encoded by the P. cruciferae DNA coding sequence fragments of SEQ ID NOs: 463-483.

### DETAILED DESCRIPTION

[0057] The following is a detailed description of the invention provided to aid those skilled in the art in practicing the invention. This description is not intended to be a detailed catalog of all the different ways in which the invention may be implemented, or all the features that may be added to the instant invention. For example, features illustrated with respect to one embodiment may be incorporated into other embodiments, and features illustrated with respect to a particular embodiment may be deleted from that embodiment. In addition, numerous variations and additions to the various embodiments of the invention will be apparent to those skilled in the art in light of the instant disclosure, which do not depart from the invention. Hence, the following descriptions are intended to illustrate some particular embodiments of the invention, and not to exhaustively specify all permutations, combinations and variations thereof. Those of ordinary skill in the art will recognize that modifications and variations in the embodiments described herein may be made without departing from the spirit or scope of the invention.

[0058] Unless otherwise defined, all technical and scientific terms used herein have the same meaning as commonly understood by one of ordinary skill in the art to which this invention belongs. The terminology used in the description of the invention herein is for the purpose of describing particular embodiments only and is not intended to be limiting of the invention. All publications, patent applications, patents, and other references mentioned herein are incorporated by reference in their entirety.

[0059] For clarity, certain terms used in the specification are defined and presented as follows:

[0060] As used herein, “a,” “an” or “the” can mean one or more than one. For example, “a cell” can mean a single cell or a multiplicity of cells.

[0061] As used herein, “and/or” refers to and encompasses any and all possible combinations of one or more of the associated listed items, as well as the lack of combinations when interpreted in the alternative (or).

[0062] Further, the term “about,” as used herein when referring to a measurable value such as an amount of a compound or agent, dose, time, temperature, and the like, is meant to encompass variations of ±20%, ±10%, ±5%, ±1%, ±0.5%, or even ±0.1% of the specified amount.

[0063] As used herein, the transitional phrase “consisting essentially of” means that the scope of a claim is to be interpreted to encompass the specified materials or steps recited in the claim and those that do not materially affect the basic and novel characteristic(s) of the claimed invention. Thus, the term “consisting essentially of” when used in a claim of this invention is not intended to be interpreted to be equivalent to “comprising.” A “coding sequence” is a nucleic acid sequence that is transcribed into RNA such as mRNA, rRNA, tRNA, snRNA, sense RNA or antisense RNA. Preferably the RNA is then translated in an organism to produce a protein.

[0064] The terms “sequence similarity” or “sequence identity” of nucleotide or amino acid sequences mean a degree of identity or similarity of two or more sequences and may be determined conventionally by using known software or computer programs such as the Best-Fit or Gap pairwise comparison programs (GCG Wisconsin Package, Genetics Computer Group, 575 Science Drive, Madison, Wis. 53711). BestFit uses the local homology algorithm of Smith and Waterman, Advances in Applied Mathematics 2:482-489 (1981), to find the best segment of identity or similarity between two sequences. Sequence comparison between two or more polynucleotides or polypeptides is generally performed by comparing portions of the two sequences over a comparison window to identify and compare local regions of sequence similarity. The comparison window is generally from about 20 to 200 contiguous nucleotides. Gap performs global alignments: all of one sequence with all of another similar sequence using the method of Needleman and Wunsch, J. Mol. Biol. 48:443-453 (1970). When using a sequence alignment program such as BestFit to determine the degree of DNA sequence homology, similarity or identity, the default setting may be used, or an appropriate scoring matrix may be selected to optimize identity, similarity or homology scores. Similarly, when using a program such as BestFit to determine sequence identity, similarity or homology between two different amino acid sequences, the default settings may be used, or an appropriate scoring matrix, such as blosum45 or blosum80, may be selected to optimize identity, similarity or homology scores.

[0065] The phrase “substantially identical,” in the context of two nucleic acids or two amino acid sequences, refers to two or more sequences or subsequences that have at least about 50% nucleotide or amino acid residue identity when compared and aligned for maximum correspondence as measured using one of the following sequence comparison algorithms or by visual inspection. In certain embodiments, substantially identical sequences have at least about 60%, or at least about 70%, or at least about 80%, or even at least about 90% or 95% nucleotide or amino acid residue identity. In certain embodiments, substantial identity exists over a region of the sequences that is at least about 50 residues in length, or over a region of at least about 100 residues, or the sequences are substantially identical over at least about 150 residues. In further embodiments, the sequences are substantially identical when they are identical over the entire length of the coding regions.

[0066] The term “homology” in the context of the invention refers to the level of similarity between nucleic acid or amino acid sequences in terms of nucleotide or amino acid identity or similarity, respectively, i.e., sequence similarity or identity. Homology, homologue, and homologous also refers to the concept of similar functional properties among different nucleic acids or proteins. Homologues include genes that are orthologous and paralogous. Homologues can be determined by using the coding sequence for a gene, disclosed herein or found in appropriate database (such as that at NCBI or others) in one or more of the following ways. For an amino acid sequence, the sequences should be compared using algorithms (for instance see section on “identity” and “substantial identity”). For nucleotide sequences the sequence of one DNA molecule can be compared to the sequence of a known or putative homologue in much the same way. Homologues are at least 20% identical, or at least 30% identical, or at least 40% identical, or at least 50% identical, or at least 60% identical, or at least 70% identical, or at least 80% identical, or at least 88% identical, or at least 90% identical, or at least 92% identical, or at least 95% identical, across any substantial region of the molecule (DNA, RNA, or protein molecule).

[0067] Optimal alignment of sequences for comparison can be conducted, e.g., by the local homology algorithm of Smith & Waterman, Adv. Appl. Math. 2: 482 (1981), by the homology alignment algorithm of Needleman & Wunsch, J. Mol. Biol. 48: 443 (1970), by the search for similarity method of Pearson & Lipman, Proc. Nat'l. Acad. Sci. USA 85: 2444 (1988), by computerized implementations of these algorithms (GAP, BESTFIT, FASTA, and TFASTA in the Wisconsin Genetics Software Package, Genetics Computer Group, 575 Science Dr., Madison, Wis.), or by visual inspection (see generally, Ausubel et al., infra).

[0068] One example of an algorithm that is suitable for determining percent sequence identity and sequence similarity is the BLAST algorithm, which is described in Altschul et al., J. Mol. Biol. 215: 403-410 (1990). Software for performing BLAST analyses is publicly available through the National Center for Biotechnology Information (http://www.ncbi.nlm.nih.gov/). This algorithm involves first identifying high scoring sequence pairs (HSPs) by identifying short words of length W in the query sequence, which either match or satisfy some positive-valued threshold score T when aligned with a word of the same length in a database sequence. T is referred to as the neighborhood word score threshold (Altschul et al., 1990). These initial neighborhood word hits act as seeds for initiating searches to find longer HSPs containing them. The word hits are then extended in both directions along each sequence for as far as the cumulative alignment score can be increased. Cumulative scores are calculated using, for nucleotide sequences, the parameters M (reward score for a pair of matching residues; always >0) and N (penalty score for mismatching residues; always <0). For amino acid sequences, a scoring matrix is used to calculate the cumulative score. Extension of the word hits in each direction are halted when the cumulative alignment score falls off by the quantity X from its maximum achieved value, the cumulative score goes to zero or below due to the accumulation of one or more negative-scoring residue alignments, or the end of either sequence is reached. The BLAST algorithm parameters W, T, and X determine the sensitivity and speed of the alignment. The BLASTN program (for nucleotide sequences) uses as defaults a wordlength (W) of 11, an expectation (E) of 10, a cutoff of 100, M=5, N=−4, and a comparison of both strands. For amino acid sequences, the BLASTP program uses as defaults a wordlength (W) of 3, an expectation (E) of 10, and the BLOSUM62 scoring matrix (see Henikoff & Henikoff, Proc. Natl. Acad. Sci. USA 89: 10915 (1989)).

[0069] In addition to calculating percent sequence identity, the BLAST algorithm also performs a statistical analysis of the similarity between two sequences (see, e.g., Karlin & Altschul, Proc. Nat'l. Acad. Sci. USA 90: 5873-5787 (1993)). One measure of similarity provided by the BLAST algorithm is the smallest sum probability (P(N)), which provides an indication of the probability by which a match between two nucleotide or amino acid sequences would occur by chance. For example, a test nucleic acid sequence is considered similar to a reference sequence if the smallest sum probability in a comparison of the test nucleic acid sequence to the reference nucleic acid sequence is less than about 0.1, more preferably less than about 0.01, and most preferably less than about 0.001.

[0070] Another widely used and accepted computer program for performing sequence alignments is CLUSTALW v1.6 (Thompson, et al. Nuc. Acids Res., 22: 4673-4680, 1994). The number of matching bases or amino acids is divided by the total number of bases or amino acids, and multiplied by 100 to obtain a percent identity. For example, if two 580 base pair sequences had 145 matched bases, they would be 25 percent identical. If the two compared sequences are of different lengths, the number of matches is divided by the shorter of the two lengths. For example, if there were 100 matched amino acids between a 200 and a 400 amino acid proteins, they are 50 percent identical with respect to the shorter sequence. If the shorter sequence is less than 150 bases or 50 amino acids in length, the number of matches are divided by 150 (for nucleic acid bases) or 50 (for amino acids), and multiplied by 100 to obtain a percent identity.

[0071] Two nucleotide sequences can also be considered to be substantially identical when the two sequences hybridize to each other under stringent conditions. In representative embodiments, two nucleotide sequences considered to be substantially identical hybridize to each other under highly stringent conditions.

[0072] The terms “stringent conditions” or “stringent hybridization conditions” include reference to conditions under which a polynucleotide will hybridize to its target sequence to a detectably greater degree than other sequences (e.g., at least 2-fold over background). Stringent conditions are sequence-dependent and will be different in different circumstances. By controlling the stringency of the hybridization and/or washing conditions, target polynucleotides can be identified which are 100% complementary to the probe (homologous probing). Alternatively, stringency conditions can be adjusted to allow some mismatching in sequences so that lower degrees of similarity are detected (heterologous probing). Typically, stringent conditions will be those in which the salt concentration is less than approximately 1.5 M Na ion, typically about 0.01 to 1.0 M Na ion (or other salts) at pH 7.0 to 8.3 and the temperature is at least about 30° C. for short probes (e.g., 10 to 50 nucleotides) and at least about 60° C. for long probes (e.g., greater than 50 nucleotides). Stringent conditions also may be achieved with the addition of destabilizing agents such as formamide. Exemplary low stringency conditions include hybridization with a buffer solution of 30 to 35% formamide, 1 M NaCl, 1% SDS (w/v; sodium dodecyl sulphate) at 37° C., and a wash in 1× to 2×SSC (20×SSC=3.0 M NaCl/0.3 M trisodium citrate) at 50 to 55° C. Moderate stringency conditions detect sequences that share at least 80% sequence identity. Exemplary moderate stringency conditions include hybridization in 40 to 45% formamide, 1 M NaCl, 1% SDS at 37° C., and a wash in 0.5× to 1×SSC at 55 to 60° C. High stringency conditions detect sequences that share at least 90% sequence identity. Exemplary high stringency conditions include hybridization in 50% formamide, 1 M NaCl, 1% SDS at 37° C., and a wash in 0.1×SSC at 60 to 65° C. Specificity is typically the function of post-hybridization washes, the critical factors being the ionic strength and temperature of the final wash solution. For DNA-DNA hybrids, the Tm can be approximated from the equation of Meinkoth and Wahl (Anal. Biochem., 138:267-284, 1984): Tm=81.5° C.+16.6 (log M)+0.41 (% GC)−0.61 (% form)−500/L; where M is the molarity of monovalent cations, % GC is the percentage of guanosine and cytosine nucleotides in the DNA, % form is the percentage of formamide in the hybridization solution, and L is the length of the hybrid in base pairs. The Tm is the temperature (under defined ionic strength and pH) at which 50% of a complementary target sequence hybridizes to a perfectly matched probe. Tm is reduced by about 1° C. for each 1% of mismatching; thus, Tm, hybridization and/or wash conditions can be adjusted to hybridize to sequences of the desired identity. For example, if sequences with approximately 90% identity are sought, the Tm can be decreased 10° C. Generally, stringent conditions are selected to be about 5° C. lower than the thermal melting point (Tm) for the specific sequence and its complement at a defined ionic strength and pH. However, severely stringent conditions can utilize hybridization and/or wash at 1, 2, 3, or 4° C. lower than the thermal melting point (Tm); moderately stringent conditions can utilize a hybridization and/or wash at 6, 7, 8, 9, or 10° C. lower than the thermal melting point (Tm); low stringency conditions can utilize a hybridization and/or wash at 11, 12, 13, 14, 15, or 20° C. lower than the thermal melting point (Tm). Using the equation, hybridization and wash compositions, and desired Tm, those of ordinary skill will understand that variations in the stringency of hybridization and/or wash solutions are inherently described. If the desired degree of mismatching results in a Tm of less than 45° C. (aqueous solution) or 32° C. (formamide solution), it is preferred to increase the SSC concentration so that a higher temperature can be used. An extensive guide to the hybridization of nucleic acids is found in Tijssen, Laboratory Techniques in Biochemistry and Molecular Biology—Hybridization with Nucleic Acid Probes, Part I, Chapter 2 “Overview of principles of hybridization and the strategy of nucleic acid probe assays”, Elsevier, N.Y. (1993); and Current Protocols in Molecular Biology, Chapter 2, Ausubel, et al., eds., Greene Publishing and Wiley-Interscience, New York (1995). Methods of stringent hybridization are known in the art which conditions can be calculated by means known in the art. This is disclosed in Sambrook et al., Molecular Cloning: A Laboratory Manual, 2nd Ed., Cold Spring Harbor Laboratory Press, 1989, Cold Spring Harbor, N.Y. and Current Protocols in Molecular Biology, Ausebel et al, eds., John Wiley and Sons, Inc., 2000. Methods of determining percent sequence identity are known in the art, an example of which is the GCG computer sequence analysis software (GCG, Inc, Madison Wis.).

[0073] Nucleic acids that do not hybridize to each other under stringent conditions are still substantially identical if the proteins that they encode are substantially identical (e.g., due to the degeneracy of the genetic code).

[0074] A further indication that two nucleic acids or proteins are substantially identical is that the protein encoded by the first nucleic acid is immunologically cross reactive with the protein encoded by the second nucleic acid. Thus, a protein is typically substantially identical to a second protein, for example, where the two proteins differ only by conservative substitutions.

[0075] A nucleic acid sequence is “isocoding with” a reference nucleic acid sequence when the nucleic acid sequence encodes a polypeptide having the same amino acid sequence as the polypeptide encoded by the reference nucleic acid sequence.

[0076] As used herein, “complementary” polynucleotides are those that are capable of base pairing according to the standard Watson-Crick complementarity rules. Specifically, purines will base pair with pyrimidines to form a combination of guanine paired with cytosine (G:C) and adenine paired with either thymine (A:T) in the case of DNA, or adenine paired with uracil (A:U) in the case of RNA. For example, the sequence “A-G-T” binds to the complementary sequence “T-C-A.” It is understood that two polynucleotides may hybridize to each other even if they are not completely complementary to each other, provided that each has at least one region that is substantially complementary to the other.

[0077] The terms “complementary” or “complementarity,” refer to the natural binding of polynucleotides under permissive salt and temperature conditions by base-pairing. Complementarity between two single-stranded molecules may be “partial,” in which only some of the nucleotides bind, or it may be complete when total complementarity exists between the single stranded molecules. The degree of complementarity between nucleic acid strands has significant effects on the efficiency and strength of hybridization between nucleic acid strands.

[0078] As used herein, the terms “substantially complementary” or “partially complementary” mean that two nucleic acid sequences are complementary at least about 50%, 60%, 70%, 80% or 90% of their nucleotides. In some embodiments, the two nucleic acid sequences can be complementary at least at 85%, 90%, 95%, 96%, 97%, 98%, 99% or more of their nucleotides. The terms “substantially complementary” and “partially complementary” can also mean that two nucleic acid sequences can hybridize under high stringency conditions and such conditions are well known in the art.

[0079] As used herein, “dsRNA” or “RNAi” refers to a polyribonucleotide structure formed either by a single self-complementary RNA strand or at least by two complementary RNA strands. The degree of complementary, in other words the % identity, need not necessarily be 100%. Rather, it must be sufficient to allow the formation of a double-stranded structure under the conditions employed. As used herein, the term “fully complementary” means that all the bases of the nucleotide sequence of the dsRNA are complementary to or ‘match’ the bases of the target nucleotide sequence. The term “at least partially complementary” means that there is less than a 100% match between the bases of the dsRNA and the bases of the target nucleotide sequence. The skilled person will understand that the dsRNA need only be at least partially complementary to the target nucleotide sequence in order to mediate down-regulation of expression of the target gene. It is known in the art that RNA sequences with insertions, deletions and mismatches relative to the target sequence can still be effective at RNAi. According to the current invention, it is preferred that the dsRNA and the target nucleotide sequence of the target gene share at least 80% or 85% sequence identity, preferably at least 90% or 95% sequence identity, or more preferably at least 97% or 98% sequence identity and still more preferably at least 99% sequence identity. Alternatively, the dsRNA may comprise 1, 2 or 3 mismatches as compared with the target nucleotide sequence over every length of 24 partially complementary nucleotides. It will be appreciated by the person skilled in the art that the degree of complementarity shared between the dsRNA and the target nucleotide sequence may vary depending on the target gene to be down-regulated or depending on the insect pest species in which gene expression is to be controlled.

[0080] It will be appreciated that the dsRNA may comprise or consist of a region of double-stranded RNA comprising annealed complementary strands, one strand of which, the sense strand, comprises a sequence of nucleotides at least partially complementary to a target nucleotide sequence within a target gene.

[0081] The target nucleotide sequence may be selected from any suitable region or nucleotide sequence of the target gene or RNA transcript thereof. For example, the target nucleotide sequence may be located within the 5′UTR or 3′UTR of the target gene or RNA transcript or within exonic or intronic regions of the gene. The skilled person will be aware of methods of identifying the most suitable target nucleotide sequences within the context of the full-length target gene. For example, multiple dsRNAs targeting different regions of the target gene can be synthesised and tested. Alternatively, digestion of the RNA transcript with enzymes such as RNAse H can be used to determine sites on the RNA that are in a conformation susceptible to gene silencing. Target sites may also be identified using in silico approaches, for example, the use of computer algorithms designed to predict the efficacy of gene silencing based on targeting different sites within the full-length gene.

[0082] Preferably, the % identity of a polyribonucleotide is determined by GAP (Needleman and Wunsch, 1970) analysis (GCG program) using the default settings, wherein the query sequence is at least about 21 to about 23 nucleotides in length, and the GAP analysis aligns the two sequences over a region of at least about 21 nucleotides. In another embodiment, the query sequence is at least 150 nucleotides in length, and the GAP analysis aligns the two sequences over a region of at least 150 nucleotides. In a further embodiment, the query sequence is at least 300 nucleotides in length and the GAP analysis aligns the two sequences over a region of at least 300 nucleotides. In yet another embodiment, the query sequence corresponds to the full length of the target RNA, for example mRNA, and the GAP analysis aligns the two sequences over the full length of the target RNA.

[0083] Conveniently, the dsRNA can be produced from a single open reading frame in a recombinant host cell, wherein the sense and anti-sense sequences are flanked by an unrelated sequence which enables the sense and anti-sense sequences to hybridize to form the dsRNA molecule with the unrelated sequence forming a loop structure. In some embodiments, the sense strand and antisense strand can be made without an open reading frame to ensure that no protein will be made in the transgenic host cell. The two strands can also be expressed separately as two transcripts, one encoding the sense strand and one encoding the antisense strand.

[0084] RNA duplex formation can be initiated either inside or outside the cell. The dsRNA can be partially or fully double-stranded. The RNA can be enzymatically or chemically synthesized, either in vitro or in vivo.

[0085] The dsRNA need not be full length relative to either the primary transcription product or fully processed RNA. It is well-known in the art that small dsRNA of about 19-23 bp in length can be used to trigger gene silencing of a target gene. Generally, higher identity can be used to compensate for the use of a shorter sequence. Furthermore, the dsRNA can comprise single stranded regions as well, e.g., the dsRNA can be partially or fully double stranded. The double stranded region of the dsRNA can have a length of at least about 19 to about 23 base pairs, optionally a sequence of about 19 to about 50 base pairs, optionally a sequence of about 50 to about 100 base pairs, optionally a sequence of about 100 to about 200 base pairs, optionally a sequence of about 200 to about 500, and optionally a sequence of about 500 to about 1000 or more base pairs, up to a molecule that is double stranded for its full length, corresponding in size to a full length target RNA molecule. Bolognesi et al (2012, PLOS One, 7(10): e47534, herein incorporated by reference) teach that dsRNAs greater than or equal to about 60 bp are required for biological activity in artificial diet bioassays with Southern Corn Rootworm (SCR; Diabrotica undecimpunctata howardii).

[0086] Mao et al (2007, Nature Biotechnology, 35(11): 1307-1313) teach a transgenic plant expressing a dsRNA construct against a target gene (CYP6AE14) of an insect pest (cotton bollworm, Helicoverpa armigera). Insects feeding on the transgenic plant have small RNAs of about 19-23 bp in size of the target gene in their midgut, with a corresponding reduction in CYP6AE14 transcripts and protein. This suggests that the small RNAs were efficacious in reducing expression of the target gene in the insect pest. Therefore, small RNAs of about 19 bp, about 20 bp, about 21 bp, about 22 bp, about 23 bp, about 24 bp, about 25 bp, about 26 bp, about 27 bp, about 28 bp, about 29 bp, or about 30 bp may be efficacious in reducing expression of the target gene in an insect pest.

[0087] Alternatively, the dsRNA may comprise a target dsRNA of at least 19 base pairs, and the target dsRNA may be within a dsRNA “carrier” or “filler” sequence. For example, Bolognesi et al (2012) show that a 240 bp dsRNA encompassing a target dsRNA, which comprised a 21 bp contiguous sequence with 100% identity to the target sequence, had biological activity in bioassays with Southern Corn Rootworm. The target dsRNA may have a length of at least 19 to about 25 base pairs, optionally a sequence of about 19 to about 50 base pairs, optionally a sequence of about 50 to about 100 base pairs, optionally a sequence of about 100 to about 200 base pairs, optionally a sequence of about 200 to about 500, and optionally a sequence of about 500 to about 1000 or more base pairs. Combined with the carrier dsRNA sequence, the dsRNA of the target sequence and the carrier dsRNA may have a total length of at least about 50 to about 100 base pairs, optionally a sequence of about 100 to about 200 base pairs, optionally a sequence of about 200 to about 500, and optionally a sequence of about 500 to about 1000 or more base pairs.

[0088] The dsRNA can contain known nucleotide analogs or modified backbone residues or linkages, which are synthetic, naturally occurring, and non-naturally occurring. Examples of such analogs include, without limitation, phosphorothioates, phosphoramidates, methyl phosphonates, chiralmethyl phosphonates and 2-O-methyl ribonucleotides.

[0089] As used herein, the term “specifically reduce the level of a target RNA and/or the production of a target protein encoded by the RNA”, and variations thereof, refers to the sequence of a portion of one strand of the dsRNA being sufficiently identical to the target RNA such that the presence of the dsRNA in a cell reduces the steady state level and/or the production of said RNA. In many instances, the target RNA will be mRNA, and the presence of the dsRNA in a cell producing the mRNA will result in a reduction in the production of said protein. Preferably, this accumulation or production is reduced at least 10%, more preferably at least 50%, even more preferably at least 75%, yet even more preferably at least 95% and most preferably 100%, when compared to a wild-type cell.

[0090] The consequences of inhibition can be confirmed by examination of the outward properties of the cell or organism or by biochemical techniques such as, but not limited to, Northern hybridization, reverse transcription, gene expression monitoring with a microarray, antibody binding, enzyme linked immunosorbent assay (ELISA), Western blotting, radioimmunoassay (RIA), and other immunoassays.

[0091] The interfering RNAs of the current invention may comprise one dsRNA or multiple dsRNAs, wherein each dsRNA comprises or consists of a sequence of nucleotides which is at least partially complementary to a target nucleotide sequence within the target gene and that functions upon uptake by an insect pest species to down-regulate expression of said target gene. Concatemeric RNA constructs of this type are described in WO2006/046148 as incorporated herein by reference. In the context of the present invention, the term ‘multiple’ means at least two, at least three, at least four, etc and up to at least 10, 15, 20 or at least 30. In one embodiment, the interfering RNA comprises multiple copies of a single dsRNA i.e. repeats of a dsRNA that binds to a particular target nucleotide sequence within a specific target gene. In another embodiment, the dsRNAs within the interfering RNA comprise or consist of different sequences of nucleotides complementary to different target nucleotide sequences. It should be clear that combinations of multiple copies of the same dsRNA combined with dsRNAs binding to different target nucleotide sequences are within the scope of the current invention.

[0092] The dsRNAs may be arranged as one contiguous region of the interfering RNA or may be separated by the presence of linker sequences. The linker sequence may comprise a short random nucleotide sequence that is not complementary to any target nucleotide sequences or target genes. In one embodiment, the linker is a conditionally self-cleaving RNA sequence, preferably a pH-sensitive linker or a hydrophobic-sensitive linker. In one embodiment, the linker comprises a sequence of nucleotides equivalent to an intronic sequence. Linker sequences of the current invention may range in length from about 1 base pair to about 10000 base pairs, provided that the linker does not impair the ability of the interfering RNA to down-regulate the expression of target gene(s).

[0093] In addition to the dsRNA(s) and any linker sequences, the interfering RNA of the invention may comprise at least one additional polynucleotide sequence. In different embodiments of the invention, the additional sequence is chosen from (i) a sequence capable of protecting the interfering RNA against RNA processing, (ii) a sequence affecting the stability of the interfering RNA, (iii) a sequence allowing protein binding, for example to facilitate uptake of the interfering RNA by cells of the insect pest species, (iv) a sequence facilitating large-scale production of the interfering RNA, (v) a sequence which is an aptamer that binds to a receptor or to a molecule on the surface of the insect pest cells to facilitate uptake, or (vi) a sequence that catalyses processing of the interfering RNA within the insect pest cells and thereby enhances the efficacy of the interfering RNA. Structures for enhancing the stability of RNA molecules are well known in the art and are described further in WO2006/046148 as incorporated herein by reference.

[0094] The interfering RNA may contain DNA bases, non-natural bases or non-natural backbone linkages or modifications of the sugar-phosphate backbone, for example to enhance stability during storage or enhance resistance to degradation by nucleases. Furthermore, the interfering RNA may be produced chemically or enzymatically by one skilled in the art through manual or automated reactions. Alternatively, the interfering RNA may be transcribed from a polynucleotide encoding the same. Thus, provided herein is an isolated polynucleotide encoding any of the interfering RNAs of the current invention.

[0095] The term “plant microRNA precursor molecule” as used herein describes a small (˜70-300 nt) non-coding RNA sequence that is processed by plant enzymes to yield a ˜19-24 nucleotide product known as a mature microRNA sequence. The mature sequences have regulatory roles through complementarity to messenger RNA (mRNA). The term “artificial plant microRNA precursor molecule” describes the non-coding miRNA precursor sequence prior to processing that is employed as a backbone sequence for the delivery of a siRNA molecule via substitution of the endogenous native miRNA/miRNA* duplex of the miRNA precursor molecule with that of a non-native, heterologous miRNA (amiRNA/amiRNA*; e.g. siRNA/siRNA*) that is then processed into the mature miRNA sequence with the siRNA sequence.

[0096] In the context of the invention, the term “toxic” used to describe a dsRNA of the invention means that the dsRNA molecules of the invention and combinations of such dsRNA molecules function as orally active insect control agents that have a negative effect on an insect. When a composition of the invention is delivered to the insect, the result is typically death of the insect, or the insect does not feed upon the source that makes the composition available to the insect. Such a composition may be a transgenic plant expressing the dsRNA of the invention.

[0097] To “control” or “controlling” insects means to inhibit, through a toxic effect, the ability of one or more insect pests to survive, grow, feed, and/or reproduce, or to limit insect-related damage or loss in crop plants. To “control” insects may or may not mean killing the insects, although it preferably means killing the insects. A composition that controls a target insect has insecticidal activity against the target insect.

[0098] To “deliver” or “delivering” a composition or dsRNA means that the composition or dsRNA comes in contact with an insect, resulting in a toxic effect and control of the insect. The composition or dsRNA can be delivered in many recognized ways, e.g., orally by ingestion by the insect via transgenic plant expression, formulated composition(s), sprayable composition(s), a bait matrix, or any other art-recognized toxicant delivery system.

[0099] The term “insect” as used herein includes any organism now known or later identified that is classified in the animal kingdom, phylum Arthropoda, class Insecta, including but not limited to insects in the orders Coleoptera (beetles), Lepidoptera (moths, butterflies), Diptera (flies), Protura, Collembola (springtails), Diplura, Microcoryphia (jumping bristletails), Thysanura (bristletails, silverfish), Ephemeroptera (mayflies), Odonata (dragonflies, damselflies), Orthoptera (grasshoppers, crickets, katydids), Phasmatodea (walkingsticks), Grylloblattodea (rock crawlers), Mantophasmatodea, Dermaptera (earwigs), Plecoptera (stoneflies), Embioptera (web spinners), Zoraptera, Isoptera (termites), Mantodea (mantids), Blattodea (cockroaches), Hemiptera (true bugs, cicadas, leafhoppers, aphids, scales), Thysanoptera (thrips), Psocoptera (book and bark lice), Phthiraptera (lice; including but not limited to suborders Amblycera, Ischnocera and Anoplura), Neuroptera (lacewings, owlflies, mantispids, antlions), Hymenoptera (bees, ants, wasps), Trichoptera (caddisflies), Siphonaptera (fleas), Mecoptera (scorpion flies), Strepsiptera (twisted-winged parasites), and any combination thereof.

[0100] A “life stage of an Alticini insect” or “flea beetle life stage” means the egg, larval, pupal or adult developmental form of an insect of the Alticini tribe, namely a species of flea beetle.

[0101] “Effective insect-controlling amount” of “insecticidally effective amount” means that concentration of dsRNA that inhibits, through a toxic effect, the ability of insects to survive, grow, feed and/or reproduce, or to limit insect-related damage or loss in crop plants. “Insecticidally effective amount” may or may not mean a concentration that kills the insects, although it preferably means that it kills the insects. In some embodiments, application of an insecticidally effective amount of the polynucleotide, such as a dsRNA molecule, to a plant improves the plant's resistance to infestation by the insect. In some embodiments, application of an insecticidally effective amount of the polynucleotide, such as a dsRNA molecule, to a crop plant improves yield (e.g., increased biomass, increased seed or fruit production, or increased oil, starch, sugar, or protein content) of that crop plant, in comparison to a crop plant not treated with the polynucleotide. While there is no upper limit on the concentrations and dosages of a polynucleotide as described herein that can be useful in the methods and compositions provided herein, lower effective concentrations and dosages will generally be sought for efficiency and economy.

[0102] Non-limiting embodiments of effective amounts of a polynucleotide include a range from about 10 nano grams per milliliter to about 100 micrograms per milliliter of a polynucleotide in a liquid form sprayed on a plant, or from about 10 milligrams per acre to about 100 grams per acre of polynucleotide applied to a field of plants, or from about 0.001 to about 0.1 microgram per milliliter of polynucleotide in an artificial diet for feeding the insect. Where compositions as described herein are topically applied to a plant, the concentrations can be adjusted in consideration of the volume of spray or treatment applied to plant leaves or other plant part surfaces, such as flower petals, stems, tubers, fruit, anthers, pollen, leaves, roots, or seeds. In one embodiment, a useful treatment for herbaceous plants using 25-mer polynucleotides is about 1 nanomole (nmol) of polynucleotides per plant, for example, from about 0.05 to 1 nmol polynucleotides per plant. Other embodiments for herbaceous plants include useful ranges of about 0.05 to about 100 nmol, or about 0.1 to about 20 nmol, or about 1 nmol to about 10 nmol of polynucleotides per plant. In certain embodiments, about 40 to about 50 nmol of a single-stranded polynucleotide as described herein are applied. In certain embodiments, about 0.5 nmol to about 2 nmol of a dsRNA as described herein is applied. In certain embodiments, a composition containing about 0.5 to about 2.0 milligrams per milliliter, or about 0.14 milligrams per milliliter of a dsRNA (or a single-stranded 21-mer) as described herein is applied. In certain embodiments, a composition of about 0.5 to about 1.5 milligrams per milliliter of a dsRNA polynucleotide as described herein of about 50 to about 200 or more nucleotides is applied. In certain embodiments, about 1 nmol to about 5 nmol of a dsRNA as described herein is applied to a plant. In certain embodiments, the polynucleotide composition as topically applied to the plant contains at least one polynucleotide as described herein at a concentration of about 0.01 to about 10 milligrams per milliliter, or about 0.05 to about 2 milligrams per milliliter, or about 0.1 to about 2 milligrams per milliliter. Very large plants, trees, or vines can require correspondingly larger amounts of polynucleotides. When using long dsRNA molecules that can be processed into multiple oligonucleotides (e.g., multiple triggers encoded by a single recombinant DNA molecule as disclosed herein) lower concentrations can be used. Non-limiting examples of effective polynucleotide treatment regimes include a treatment of between about 0.1 to about 1 nmol of polynucleotide molecule per plant, or between about 1 nmol to about 10 nmol of polynucleotide molecule per plant, or between about 10 nmol to about 100 nmol of polynucleotide molecule per plant.

[0103] Crops of useful plants that may be protected according to this aspect of the invention include crop plants and/or ornamental plants. Crop plants include for example, members of the Solanaceae, Brassicacae, Labiatae and Fabaceae families, and flowering ornamental plants include in particular members of the Rubiaceae. In some embodiments, the crop a plant in the family Brassicaceae, including a Brassica species selected from the group consisting of B. napus, B. juncea, B. carinata, B. rapa, B. oleracea, B. rupestris, B. septiceps, B. nigra, B. narinosa, B. perviridus, B. tournefortii, and B. fructiculosas. In other embodiments, the plant is selected from the group consisting of Glycine max, Linum usitatissimum, Zea mays, Carthamus tinctorius, Helianthus annuus, Nicotiana tabacum, Arabidopsis thaliana, Betholettia excelsa, Ricinus communis, Cocus nucifera, Coriandrum sativum, Gossypium spp., Arachis hypogaea, Simmondsia chinensis, Solanum tuberosum, Elaeis guineensis, Olea europaea, Oryza sativa, Cucurbita maxim, Hordeum vulgare, and Triticum aestivum. In some embodiments the following ornamental plants may be protected against attack/infestation from flea beetles: Gardenia spp, Rothmannia spp, and ornamental Brassicacae.

[0104] Crops of useful plants are to be understood as including those which are/have been made tolerant to herbicides or classes of herbicide and/or insecticide or classes of insecticide, and/or which have acquired a so-called “output” trait (e.g. improved storage staibilty, higher nutritional value, improved yield etc.) by conventional plant-breeding or genetic engineering methods. Examples of useful plants that have been rendered tolerant to herbicides by genetic engineering methods include e.g. glyphosate- and glufosinate resistant varieties available under the trade names RoundupReady® and LibertyLink®, (e.g. RoundupReady® Canola and LibertyLink® Canola). An example of a crop that has been rendered tolerant to imidazolininone herbicides (e.g. imazamox) by conventional breeding methods includes Clearfield® summer rape (canola). Thus useful plants include those where the plants are transgenic, or where the plants have inherited a trait as a consequence of the introduction at least one transgene in their lineage.

[0105] As shown herein, the dsRNA molecules of the invention are surprisingly effective at controlling insects, namely flea beetles, in the Alticini tribe. The control of such insects is particularly important where it has been found that such insects exhibit resistance (or tolerance) to the insecticides that have hitherto been used for their control. Thus the methods of the invention not only have applicability against Alticini tribe members that are sensitive to insecticides other than the compositions of the invention, but also against Alticini tribe members that are resistant to insecticides, in particular Alticini tribe members resistant to pyrethroid and/or organophosphate pesticides.

[0106] In preferred embodiments of the aspects of the invention discussed herein, a composition of the invention is used to control insects of the tribe Alticini, commonly known as flea beetles.

[0107] Adult flea beetles damage plants by chewing numerous small holes in the leaves. Flea beetles can be the most detrimental to seedlings, however when the populations are high, flea beetles can defoliate and kill entire established plants. Flea beetles may also transmit viral and bacterial diseases which further affect the health and yield of the crop plants. Thus, in further aspects the invention provides methods of increasing the yield from crops of useful plants that are under attack by flea beetles from the tribe Alticini and/or maintaining yield or reducing yield loss from crops of useful plants that susceptible to attack by flea beetles of the tribe Alticini.

[0108] The methods of the present invention may be used to control all insects of the tribe Alticini. In some embodiments, the methods of the present invention may be used to control all insects of a genus selected from the group consisting of the genera Altica, Anthobiodes, Aphthona, Aphthonaltica, Aphthonoides, Apteopeda, Argopistes, Argopus, Arrhenocoela, Batophila, Blepharida, Chaetocnema, Clitea, Crepidodera, Derocrepis, Dibolia, Disonycha, Epitrix, Hermipyxis, Hermaeophaga, Hespera, Hippuriphila, Horaia, Hyphasis, Lipromima, Liprus, Longitarsus, Luperomorpha, Lythraria, Manobia, Mantura, Meishania, Minota, Mniophila, Neicrepidodera, Nonarthra, Novofoudrasia, Ochrosis, Oedionychis, Oglobinia, Omeisphaera, Ophrida, Orestia, Paragopus, Pentamesa, Philopona, Phygasia, Phyllotreta, Podagrica, Podagricomela, Podontia, Pseudodera, Psylliodes, Sangariola, Sinaltica, Sphaeroderma, Systena, Trachyaphthona, Xuthea, and Zipangia. In particular, methods of the invention may be used in the control of the following species: Altica ambiens (alder flea beetle), Altica canadensis (prairie flea beetle), Altica chalybaea (grape flea beetle), Altica prasina (poplar flea beetle), Altica rosae (rose flea beetle), Altica sylvia (blueberry flea beetle), Altica ulmi (elm flea beetle), Chaetocnema pulicaria (corn flea beetle), Chaetocnema conofinis (sweet potato flea beetle), Epitrix cucumeris (potato flea beetle), Systena blanda (palestripped flea beetle), and Systena frontalis (redheaded flea beetle). In embodiments, the insect is a species selected from the group consisting of Phyllotreta armoraciae (horseradish flea beetle), Phyllotreta cruciferae (canola flea beetle), Phyllotreta pusilla (western black flea beetle), Phyllotreta nemorum (striped turnip flea beetle), Phyllotreta atra (turnip flea beetle), Phyllotreta robusta (garden flea beetle), Phyllotreta striolata (striped flea beetle), Phyllotreta undulata, Psylliodes chrysocephala, and Psylliodes punctulata (hop flea beetle). In further embodiments the methods of the invention will be used to control P. chrysocephala, P. nemorum, and P. striolata.

[0109] Methods include those developed for specific flea beetle pests for a given plant, e.g., wherein the plant is a potato plant and the insect is Epitrix cucumeris (potato flea beetle). In some embodiments, specific target genes are identified as targets for RNAi-mediated control in a given insect species. Various embodiments of the method include those wherein (a) the insect is Psylliodes chrysocephala and the target gene has a DNA sequence selected from the group consisting of SEQ ID NOs:1-21; (b) the insect is Phyllotreta nemorum and the target gene has a DNA sequence selected from the group consisting of SEQ ID NOs: 22-42; (c) the insect is Phyllotreta striolata and the target gene has a DNA sequence selected from the group consisting of SEQ ID NOs:43-63; (d) the insect is Phyllotreta armoraciae and the target gene has a DNA sequence selected from the group consisting of SEQ ID NOs:442-462; or (e) the insect is Phyllotreta cruciferae and the target gene has a DNA sequence selected from the group consisting of SEQ ID NOs:463-483.

[0110] The term “agrochemically active ingredient” refers to chemicals and/or biological compositions, such as those described herein, which are effective in killing, preventing, or controlling the growth of undesirable pests, such as, plants, insects, mice, microorganism, algae, fungi, bacteria, and the like (such as pesticidally active ingredients). An interfering RNA molecule of the invention is an agrochemically active ingredient.

[0111] An “agriculturally acceptable carrier” includes adjuvants, mixers, enhancers, etc. beneficial for application of an active ingredient, such as an interfering RNA molecule of the invention. Suitable carriers should not be phytotoxic to valuable crops, particularly at the concentrations employed in applying the compositions in the presence of crops, and should not react chemically with the compounds of the active ingredient herein, namely an interfering RNA of the invention, or other composition ingredients. Such mixtures can be designed for application directly to crops, or can be concentrates or formulations which are normally diluted with additional carriers and adjuvants before application. They may include inert or active components and can be solids, such as, for example, dusts, granules, water dispersible granules, or wettable powders, or liquids, such as, for example, emulsifiable concentrates, solutions, emulsions or suspensions. Suitable agricultural carriers may include liquid carriers, for example water, toluene, xylene, petroleum naphtha, crop oil, acetone, methyl ethyl ketone, cyclohexanone, trichloroethylene, perchloroethylene, ethyl acetate, amyl acetate, butyl acetate, propylene glycol monomethyl ether and diethylene glycol monomethyl ether, methanol, ethanol, isopropanol, amyl alcohol, ethylene glycol, propylene glycol, glycerine, and the like. Water is generally the carrier of choice for the dilution of concentrates. Suitable solid carriers may include talc, pyrophyllite clay, silica, attapulgus clay, kieselguhr, chalk, diatomaceous earth, lime, calcium carbonate, bentonire clay, Fuller's earth, cotton seed hulls, wheat flour, soybean flour, pumice, wood flour, walnut shell flour, lignin, and the like.

[0112] It is recognized that the polynucleotides comprising sequences encoding the silencing element can be used to transform organisms to provide for host organism production of these components, and further used for subsequent application of the host organism to the environment of the target pest(s). In this manner, the combination of polynucleotides encoding the silencing element may be introduced via a suitable vector into a microbial host, and said host applied to the environment, or to plants or animals.

[0113] For the present invention, an agriculturally acceptable carrier may also include non-pathogenic, attenuated strains of microorganisms, which carry the insect control agent, namely an interfering RNA molecule of the invention. In this case, the microorganisms carrying the interfering RNA may also be referred to as insect control agents. The microorganisms may be engineered to express a nucleotide sequence of a target gene to produce interfering RNA molecules comprising RNA sequences homologous or complementary to RNA sequences typically found within the cells of an insect. Exposure of the insects to the microorganisms result in ingestion of the microorganisms and down-regulation of expression of target genes mediated directly or indirectly by the interfering RNA molecules or fragments or derivatives thereof.

[0114] Further, microbial hosts that are known to occupy the “phytosphere” (phylloplane, phyllosphere, rhizosphere, and/or rhizoplana) of one or more crops of interest may be selected. These microorganisms are selected so as to be capable of successfully competing in the particular environment with the wild-type microorganisms, provide for stable maintenance and expression of the sequences encoding the interfering RNA molecule of the invention, and desirably, provide for improved protection of the components from environmental degradation and inactivation.

[0115] Such microorganisms include bacteria, algae, and fungi. Of particular interest are microorganisms such as bacteria, e.g., Pseudomonas, Erwinia, Serratia, Klebsiella, Escherichia, Xanthomonas, Streptomyces, Rhizobium, Rhodopseudomonas, Methylius, Agrobacterium, Acetobacter, Lactobacillus, Arthrobacter, Azotobacter, Leuconostoc, and Alcaligenes; fungi, particularly yeast, e.g., Saccharomyces, Cryptococcus, Kluyveromyces, Sporobolomyces, Rhodotorula, and Aureobasidium. Of particular interest are such phytosphere bacterial species as Pseudomonas syringae, Pseudomonas fluorescens, Serratia marcescens, Acetobacter xylinurm, Agrobacteria spp., Rhodopseudomonas spheroides, Xanthomonas campestris, Rhizobium melioti, Alcaligenes entrophus, Clavibacter xyli and Azotobacter vinlandir, and phytosphere yeast species such as Rhodotorula rubra, R. glutinis, R. marina, R. aurantiaca, Cryptococcus albidus, C. diffluens, C. laurentii, Saccharomyces rosei, S. pretoriensis, S. cerevisiae, Sporobolomyces rosues, S. odorus, Kluyveromyces veronae, and Aureobasidium pollulans.

[0116] A number of ways are available for introducing the polynucleotide comprising the silencing element into the microbial host under conditions that allow for stable maintenance and expression of such nucleotide encoding sequences. For example, expression cassettes can be constructed which include the nucleotide constructs of interest operably linked with the transcriptional and translational regulatory signals for expression of the nucleotide constructs, and a nucleotide sequence homologous with a sequence in the host organism, whereby integration will occur, and/or a replication system that is functional in the host, whereby integration or stable maintenance will occur.

[0117] Transcriptional and translational regulatory signals include, but are not limited to, promoters, transcriptional initiation start sites, operators, activators, enhancers, other regulatory elements, ribosomal binding sites, an initiation codon, termination signals, and the like. Methods for the production of expression constructs comprising such regulatory signals are well known in the art; see for example Sambrook et al. (2000); Molecular Cloning: A Laboratory Manual (3rd ed.; Cold Spring Harbor Laboratory Press, Plainview, N.Y.); Davis et al. (1980) Advanced Bacterial Genetics (Cold Spring Harbor Laboratory, Cold Spring Harbor, N.Y.); and the references cited therein.

[0118] Suitable host cells include the prokaryotes and the lower eukaryotes, such as fungi. Illustrative prokaryotes, both Gram-negative and Gram-positive, include Enterobacteriaceae, such as Escherichia, Erwinia, Shigella, Salmonella, and Proteus; Bacillaceae; Rhizobiceae, such as Rhizobium; Spirillaceae, such as photobacterium, Zymomonas, Serratia, Aeromonas, Vibrio, Desulfovibrio, Spirillum; Lactobacillaceae; Pseudomonadaceae, such as Pseudomonas and Acetobacter; Azotobacteraceae and Nitrobacteraceae. Among eukaryotes are fungi, such as Phycomycetes and Ascomycetes, which includes yeast such as Saccharomyces and Schizosaccharomyces; and Basidiomycetes yeast, such as Rhodotorula, Aureobasidium, Sporobolomyces, and the like.

[0119] Characteristics of particular interest in selecting a host cell for purposes of the invention include ease of introducing the coding sequence into the host, availability of expression systems, efficiency of expression, RNA stability in the host, and the presence of auxiliary genetic capabilities. Characteristics of interest for use as a pesticide microcapsule include protective qualities, such as thick cell walls, pigmentation, and intracellular packaging or formation of inclusion bodies; leaf affinity; lack of mammalian toxicity; attractiveness to pests for ingestion; and the like. Other considerations include ease of formulation and handling, economics, storage stability, and the like.

[0120] Host organisms of particular interest include yeast, such as Rhodotorula spp., Aureobasidium spp., Saccharomyces spp., and Sporobolomyces spp., phylloplane organisms such as Pseudomonas spp., Erwinia spp., and Flavobacterium spp., and other such organisms, including Pseudomonas aeruginosa, Pseudomonas fluorescens, Saccharomyces cerevisiae, Bacillus thuringiensis, Escherichia coli, Bacillus subtilis, and the like.

[0121] The sequences encoding the interfering RNA molecules encompassed by the invention can be introduced into microorganisms that multiply on plants (epiphytes) to deliver these components to potential target pests. Epiphytes, for example, can be gram-positive or gram-negative bacteria.

[0122] An interfering RNA molecule of the invention can be fermented in a bacterial host and the resulting bacteria processed, and used as a microbial spray in the same manner that Bacillus thuringiensis strains have been used as insecticidal sprays. Any suitable microorganism can be used for this purpose. Pseudomonas spp. have been used to express Bacillus thuringiensis endotoxins as encapsulated proteins and the resulting cells processed and sprayed as an insecticide (Gaertner et al. 1993. Advanced Engineered Pesticides, ed. L. Kim (Marcel Decker, Inc.). E. coli is also well-known in the art for expressing molecules of interest as part during a fermentation process. In some embodiments, the resulting bacteria is processed by heat inactivation. In some embodiments, heat inactivation kills the bacteria but does not degrade the produced RNA molecules. The resulting compositions may then be formulated in accordance with conventional techniques for application to the environment hosting a target pest, e.g., soil, water, and foliage of plants.

[0123] Alternatively, the components of the invention are produced by introducing heterologous genes into a cellular host. Expression of the heterologous sequences results, directly or indirectly, in the intracellular production of the silencing element. These compositions may then be formulated in accordance with conventional techniques for application to the environment hosting a target pest, e.g., soil, water, and foliage of plants.

[0124] The transformed microorganisms carrying an interfering RNA molecule of the invention may also be referred to as insect control agents. The microorganisms may be engineered to express a nucleotide sequence of a target gene to produce interfering RNA molecules comprising RNA sequences homologous or complementary to RNA sequences typically found within the cells of an insect. Exposure of the insects to the microorganisms result in ingestion of the microorganisms and down-regulation of expression of target genes mediated directly or indirectly by the interfering RNA molecules or fragments or derivatives thereof.

[0125] In the present invention, a transformed microorganism can be formulated with an acceptable carrier into separate or combined compositions that are, for example, a suspension, a solution, an emulsion, a dusting powder, a dispersible granule, a wettable powder, and an emulsifiable concentrate, an aerosol, an impregnated granule, an adjuvant, a coatable paste, and also encapsulations in, for example, polymer substances.

[0126] Such compositions disclosed above may be obtained by the addition of a surface-active agent, an inert carrier, a preservative, a humectant, a feeding stimulant, an attractant, an encapsulating agent, a binder, an emulsifier, a dye, a UV protectant, a buffer, a flow agent or fertilizers, micronutrient donors, or other preparations that influence plant growth. One or more agrochemicals including, but not limited to, herbicides, insecticides, fungicides, bactericides, nematicides, molluscicides, acaracides, plant growth regulators, harvest aids, and fertilizers, can be combined with carriers, surfactants or adjuvants customarily employed in the art of formulation or other components to facilitate product handling and application for particular target pests. Suitable carriers and adjuvants can be solid or liquid and correspond to the substances ordinarily employed in formulation technology, e.g., natural or regenerated mineral substances, solvents, dispersants, wetting agents, tackifiers, binders, or fertilizers. The active ingredients of the present invention (i.e., at least one interfering RNA molecule) are normally applied in the form of compositions and can be applied to the crop area, plant, or seed to be treated. For example, the compositions may be applied to grain in preparation for or during storage in a grain bin or silo, etc. The compositions may be applied simultaneously or in succession with other compounds. Methods of applying an active ingredient or a composition that contains at least one interfering RNA molecule include, but are not limited to, foliar application, seed coating, and soil application. The number of applications and the rate of application depend on the intensity of infestation by the corresponding pest.

[0127] The compositions comprising an interfering RNA molecule of the invention can be in a suitable form for direct application or as a concentrate of primary composition that requires dilution with a suitable quantity of water or other dilutant before application. The compositions (including the transformed microorganisms) can be applied to the environment of an insect pest such as a flea beetle, for example an insect species selected from the group consisting of Phyllotreta armoraciae (horseradish flea beetle), Phyllotreta cruciferae (canola flea beetle), Phyllotreta pusilla (western black flea beetle), Phyllotreta nemorum (striped turnip flea beetle), Phyllotreta atra (turnip flea beetle), Phyllotreta robusta (garden flea beetle), Phyllotreta striolata (striped flea beetle), Phyllotreta undulata, Psylliodes chrysocephala, or Psylliodes punctulata (hop flea beetle), by, for example, spraying, atomizing, dusting, scattering, coating or pouring, introducing into or on the soil, introducing into irrigation water, by seed treatment or general application or dusting at the time when the pest has begun to appear or before the appearance of pests as a protective measure. For example, the composition(s) and/or transformed microorganism(s) may be mixed with grain to protect the grain during storage. It is generally important to obtain good control of pests in the early stages of plant growth, as this is the time when the plant can be most severely damaged.

[0128] Application is of the compounds of the invention is preferably to a crop of canola plants, the locus thereof or propagation material thereof. Preferably application is to a crop of canola plants or the locus thereof, more preferably to a crop of canola plants. Application may be before infestation or when the pest is present. Application of the compounds of the invention can be performed according to any of the usual modes of application, e.g. foliar, drench, soil, in furrow etc.

[0129] The compounds of the invention may be applied in combination with an attractant. An attractant is a chemical that causes the insect to migrate towards the location of application. Suitable attractants may include glucose, saccharose, salt, glutamate (e.g. Aji-no-moto™), and citric acid (e.g. Orobor™).

[0130] An attractant may be premixed with the compound of the invention prior to application, e.g. as a ready-mix or tank-mix, or by simultaneous application or sequential application to the plant. Suitable rates of attractants are for example 0.02 kg/ha-3 kg/ha.

[0131] The compositions can conveniently contain another insecticide if this is thought necessary. In an embodiment of the invention, the composition(s) is applied directly to the soil, at a time of planting, in granular form of a composition of a carrier and dead cells of a Bacillus strain or transformed microorganism of the invention. Another embodiment is a granular form of a composition comprising an agrochemical such as, for example, a herbicide, an insecticide, a fertilizer, in an inert carrier, and dead cells of a Bacillus strain or live or dead cells of transformed microorganisms of the invention.

[0132] In another embodiment, the interfering RNA molecules may be encapsulated in a synthetic matrix such as a polymer and applied to the surface of a host such as a plant. Ingestion of the host cells by an insect permits delivery of the insect control agents to the insect and results in down-regulation of a target gene in the host.

[0133] A composition of the invention, for example a composition comprising an interfering RNA molecule of the invention and an agriculturally acceptable carrier, may be used in conventional agricultural methods. For example, the compositions of the invention may be mixed with water and/or fertilizers and may be applied preemergence and/or postemergence to a desired locus by any means, such as airplane spray tanks, irrigation equipment, direct injection spray equipment, knapsack spray tanks, cattle dipping vats, farm equipment used in ground spraying (e.g., boom sprayers, hand sprayers), and the like. The desired locus may be soil, plants, and the like.

[0134] A composition of the invention may be applied to a seed or plant propagule in any physiological state, at any time between harvest of the seed and sowing of the seed; during or after sowing; and/or after sprouting. It is preferred that the seed or plant propagule be in a sufficiently durable state that it incurs no or minimal damage, including physical damage or biological damage, during the treatment process. A formulation may be applied to the seeds or plant propagules using conventional coating techniques and machines, such as fluidized bed techniques, the roller mill method, rotostatic seed treaters, and drum coaters.

[0135] In order to apply an active ingredient to insects of the Alticini tribe and/or crops of useful plants as required by the methods of the invention said active ingredient may be used in pure form or, more typically, formulated into a composition which includes, in addition to said active ingredient, a suitable inert diluent or carrier and optionally, a surface active agent (SFA). SFAs are chemicals which are able to modify the properties of an interface (for example, liquid/solid, liquid/air or liquid/liquid interfaces) by lowering the interfacial tension and thereby leading to changes in other properties (for example dispersion, emulsification and wetting). SFAs include non-ionic, cationic and/or anionic surfactants, as well as surfactant mixtures. Thus in further embodiments according to any aspect of the invention mentioned hereinbefore, the active ingredient will be in the form of a composition additionally comprising an agriculturally acceptable carrier or diluent.

[0136] The compositions can be chosen from a number of formulation types, including dustable powders (DP), soluble powders (SP), water soluble granules (SG), water dispersible granules (WG), wettable powders (WP), granules (GR) (slow or fast release), soluble concentrates (SL), oil miscible liquids (OL), ultra low volume liquids (UL), emulsifiable concentrates (EC), dispersible concentrates (DC), emulsions (both oil in water (EW) and water in oil (EO)), micro-emulsions (ME), suspension concentrates (SC), aerosols, fogging/smoke formulations, capsule suspensions (CS) and seed treatment formulations. The formulation type chosen in any instance will depend upon the particular purpose envisaged and the physical, chemical and biological properties of the compound of formula (I).

[0137] Dustable powders (DP) may be prepared by mixing the active ingredient with one or more solid diluents (for example natural clays, kaolin, pyrophyllite, bentonite, alumina, montmorillonite, kieselguhr, chalk, diatomaceous earths, calcium phosphates, calcium and magnesium carbonates, sulfur, lime, flours, talc and other organic and inorganic solid carriers) and mechanically grinding the mixture to a fine powder.

[0138] Soluble powders (SP) may be prepared by mixing a compound of formula (I) with one or more water-soluble inorganic salts (such as sodium bicarbonate, sodium carbonate or magnesium sulfate) or one or more water-soluble organic solids (such as a polysaccharide) and, optionally, one or more wetting agents, one or more dispersing agents or a mixture of said agents to improve water dispersibility/solubility. The mixture is then ground to a fine powder. Similar compositions may also be granulated to form water soluble granules (SG).

[0139] Wettable powders (WP) may be prepared by mixing the active ingredient with one or more solid diluents or carriers, one or more wetting agents and, preferably, one or more dispersing agents and, optionally, one or more suspending agents to facilitate the dispersion in liquids. The mixture is then ground to a fine powder. Similar compositions may also be granulated to form water dispersible granules (WG).

[0140] Granules (GR) may be formed either by granulating a mixture of the active ingredient and one or more powdered solid diluents or carriers, or from pre-formed blank granules by absorbing the active ingredient (or a solution thereof, in a suitable agent) in a porous granular material (such as pumice, attapulgite clays, fuller's earth, kieselguhr, diatomaceous earths or ground corn cobs) or by adsorbing the active ingredient (or a solution thereof, in a suitable agent) on to a hardcore material (such as sands, silicates, mineral carbonates, sulfates or phosphates) and drying if necessary. Agents which are commonly used to aid absorption or adsorption include solvents (such as aliphatic and aromatic petroleum solvents, alcohols, ethers, ketones and esters) and sticking agents (such as polyvinyl acetates, polyvinyl alcohols, dextrins, sugars and vegetable oils). One or more other additives may also be included in granules (for example an emulsifying agent, wetting agent or dispersing agent).

[0141] Dispersible Concentrates (DC) may be prepared by dissolving the active ingredient in water or an organic solvent, such as a ketone, alcohol or glycol ether. These solutions may contain a surface active agent (for example to improve water dilution or prevent crystallisation in a spray tank). Emulsifiable concentrates (EC) or oil-in-water emulsions (EW) may be prepared by dissolving the active ingredient in an organic solvent (optionally containing one or more wetting agents, one or more emulsifying agents or a mixture of said agents). Suitable organic solvents for use in ECs include aromatic hydrocarbons (such as alkylbenzenes or alkylnaphthalenes, exemplified by SOLVESSO 100, SOLVESSO 15060 and SOLVESSO 200; SOLVESSO is a Registered TradeMark), ketones (such as cyclohexanone or methylcyclohexanone) and alcohols (such as benzyl alcohol, furfuryl alcohol or butanol), N-alkylpyrrolidones (such as N-methylpyrrolidoneor N-octylpyrrolidone), dimethyl amides of fatty acids (such as C8-C10 fatty acid dimethylamide) and chlorinated hydrocarbons. An EC product may spontaneously emulsify on addition to water, to produce an emulsion with sufficient stability to allow spray application through appropriate equipment. Preparation of an EW involves obtaining a compound of formula (I) either as a liquid (if it is not a liquid at room temperature, it may be melted at a reasonable temperature, typically below 70° C.) or in solution (by dissolving it in an appropriate solvent) and then emulsifiying the resultant liquid or solution into water containing one or more SFAs, under high shear, to produce an emulsion. Suitable solvents for use in EW s include vegetable oils, chlorinated hydrocarbons (such as chlorobenzenes), aromatic solvents (such as alkylbenzenes or alkylnaphthalenes) and other appropriate organic solvents which have a low solubility in water.

[0142] Microemulsions (ME) may be prepared by mixing water with a blend of one or more solvents with one or more SF As, to produce spontaneously a thermodynamically stable isotropic liquid formulation. The active ingredient is present initially in either the water or the solvent/SPA blend. Suitable solvents for use in MEs include those hereinbefore described for use in ECs or in EWs. A ME may be either an oil-in-water or a water-in-oil system (which system is present may be determined by conductivity measurements) and may be suitable for mixing water-soluble and oil-soluble pesticides in the same formulation. A ME is suitable for dilution into water, either remaining as a microemulsion or forming a conventional oil-in-water emulsion.

[0143] Suspension concentrates (SC) may comprise aqueous or non-aqueous suspensions of finely divided insoluble solid particles the active ingredient. SCs may be prepared by ball or bead milling the solid active ingredient in a suitable medium, optionally with one or more dispersing agents, to produce a fine particle suspension of the compound. One or more wetting agents may be included in the composition and a suspending agent may be included to reduce the rate at which the particles settle. Alternatively, the active ingredient may be dry milled and added to water, containing agents hereinbefore described, to produce the desired end product.

[0144] Aerosol formulations comprise the active ingredient and a suitable propellant (for example n-butane). Active ingredients may also be dissolved or dispersed in a suitable medium (for example water or a water miscible liquid, such as n-propanol) to provide compositions for use in non-pressurized, hand-actuated spray pumps. The active ingredient may be mixed in the dry state with a pyrotechnic mixture to form a composition suitable for generating, in an enclosed space, a smoke containing the compound.

[0145] Capsule suspensions (CS) may be prepared in a manner similar to the preparation of EW formulations but with an additional polymerization stage such that an aqueous dispersion of oil droplets is obtained, in which each oil droplet is encapsulated by a polymeric shell and contains the active ingredient and, optionally, a carrier or diluent therefor. The polymeric shell may be produced by either an interfacial polycondensation reaction or by a coacervation procedure. The compositions may provide for controlled release of the compound of the active ingredient. Active ingredients may also be formulated in a biodegradable polymeric matrix to provide a slow, controlled release of the compound. A composition may include one or more additives to improve the biological performance of the composition (for example by improving wetting, retention or distribution on surfaces; resistance to rain on treated surfaces; or uptake or mobility of the active ingredient. Such additives include surface active agents, spray additives based on oils, for example certain mineral oils, natural plant oils (such as soy bean and rape seed oil) and/or modified plant oils (e.g. esterified plant oils), and blends of these with other bio-enhancing adjuvants (ingredients which may aid or modify the action of the active ingredient. Where the active ingredient described herein is employed in methods of protecting crops of useful plants, methods of enhancing/maintaining yield and/or methods of increasing/maintaining pollination in crops of useful plants, it is preferred that said active ingredient (or compositions containing such active ingredient) is applied to the crop of useful plants at the flower-bud stage. In particular for crops of useful plants wherein said plants have yellow flowers, (e.g. oilseed rape, mustard etc.) it is preferred that the application occurs at the green to yellow bud stage.

[0146] Wetting agents, dispersing agents and emulsifying agents may be surface SFAs of the cationic, anionic, amphoteric or non-ionic type. Suitable SFAs of the cationic type include quaternary ammonium compounds (for example cetyltrimethyl ammonium bromide), imidazolines and amine salts.

[0147] Suitable anionic SFAs include alkali metals salts of fatty acids, salts of aliphatic monoesters of sulfuric acid (for example sodium lauryl sulfate), salts of sulfonated aromatic compounds (for example sodium dodecylbenzenesulfonate, calcium dodecylbenzenesulfonate, butylnaphthalene sulfonate and mixtures of sodium di-isopropyl- and tri-isopropyl-naphthalene sulfonates), ether sulfates, alcohol ether sulfates (for example sodium laureth-3-sulfate), ether carboxylates (for example sodium laureth-3-carboxylate), phosphate esters (products from the reaction between one or more fatty alcohols and phosphoric acid (predominately mono-esters) or phosphorus pentoxide (predominately di-esters), for example the reaction between lauryl alcohol and tetraphosphoric acid; additionally these products may be ethoxylated), sulfosuccinamates, paraffin or olefine sulfonates, taurates and lignosulfonates.

[0148] Suitable SFAs of the amphoteric type include betaines, propionates and glycinates.

[0149] Suitable SFAs of the non-ionic type include condensation products of alkylene oxides, such as ethylene oxide, propylene oxide, butylene oxide or mixtures thereof, with fatty alcohols (such as oleyl alcohol or cetyl alcohol) or with alkylphenols (such as octylphenol, nonylphenol or octylcresol); partial esters derived from long chain fatty acids or hexitol anhydrides; condensation products of said partial esters with ethylene oxide; block polymers (comprising ethylene oxide and propylene oxide); alkanolamides; simple esters (for example fatty acid polyethylene glycol esters); amine oxides (for example lauryl dimethyl amine oxide); and lecithins.

[0150] Suitable suspending agents include hydrophilic colloids (such as polysaccharides, polyvinylpyrrolidone or sodium carboxymethylcellulose) and swelling clays (such as bentonite or attapulgite).

[0151] A compound of the invention may be applied by any of the known means of applying pesticidal compounds. For example, it may be applied, formulated or unformulated, to the pests or to a locus of the pests (such as a habitat of the pests, or a growing plant liable to infestation by the pests) or to any part of the plant, including the foliage, stems, branches or roots, to the seed before it is planted or to other media in which plants are growing or are to be planted (such as soil surrounding the roots, the soil generally, paddy water or hydroponic culture systems), directly or it may be sprayed on, dusted on, applied by dipping, applied as a cream or paste formulation, applied as a vapor or applied through distribution or incorporation of a composition (such as a granular composition or a composition packed in a water-soluble bag) in soil or an aqueous environment.

[0152] A compound of the invention may also be injected into plants or sprayed onto vegetation using electrodynamic spraying techniques or other low volume methods, or applied by land or aerial irrigation systems.

[0153] Compositions for use as aqueous preparations (aqueous solutions or dispersions) are generally supplied in the form of a concentrate containing a high proportion of the active ingredient, the concentrate being added to water before use. These concentrates, which may include DCs, SCs, ECs, EWs, MEs, SGs, SPs, WPs, WGs and CSs, are often required to withstand storage for prolonged periods and, after such storage, to be capable of addition to water to form aqueous preparations which remain homogeneous for a sufficient time to enable them to be applied by conventional spray equipment. Such aqueous preparations may contain varying amounts of a compound of the invention (for example 0.0001 to 10%, by weight) depending upon the purpose for which they are to be used.

[0154] A compound of the invention may be used in mixtures with fertilizers (for example nitrogen-, potassium- or phosphorus-containing fertilizers). Suitable formulation types include granules of fertilizer. The mixtures preferably contain up to 25% by weight of the compound of the invention.

[0155] The invention therefore also provides a fertilizer composition comprising a fertilizer and a compound of the invention.

[0156] The compositions of this invention may contain other compounds having biological activity, for example micronutrients or compounds having fungicidal activity or which possess plant growth regulating, herbicidal, insecticidal, nematicidal or acaricidal activity.

[0157] The compound of the invention may be the sole active ingredient of the composition or it may be admixed with one or more additional active ingredients such as a pesticide, fungicide, synergist, herbicide or plant growth regulator where appropriate. An additional active ingredient may: provide a composition having a broader spectrum of activity or increased persistence at a locus; synergize the activity or complement the activity (for example by increasing the speed of effect or overcoming repellency) of the compound of the invention; or help to overcome or prevent the development of resistance to individual components.

[0158] Compositions of the invention include those prepared by premixing prior to application, e.g. as a readymix or tankmix, or by simultaneous application or sequential application to the plant.

[0159] In some embodiments, an acceptable agricultural carrier is a formulation useful for applying the composition comprising the interfering RNA molecule to a plant or seed. In some embodiments, the interfering RNA molecules are stabilized against degradation because of their double stranded nature and the introduction of Dnase/Rnase inhibitors. For example, dsRNA or siRNA can be stabilized by including thymidine or uridine nucleotide 3′ overhangs. The dsRNA or siRNA contained in the compositions of the invention can be chemically synthesized at industrial scale in large amounts. Methods available would be through chemical synthesis or through the use of a biological agent.

[0160] In other embodiments the formulation comprises a transfection promoting agent. In other embodiments, the transfection promoting agent is a lipid-containing compound. In further embodiments, the lipid-containing compound is selected from the group consisting of; Lipofectamine, Cellfectin, DMRIE-C, DOTAP and Lipofectin. In another embodiment, the lipid-containing compound is a Tris cationic lipid.

[0161] In some embodiments, the formulation further comprises a nucleic acid condensing agent. The nucleic acid condensing agent can be any such compound known in the art. Examples of nucleic acid condensing agents include, but are not limited to, spermidine (N-[3-aminopropyl]-1,4-butanediamine), protamine sulphate, poly-lysine as well as other positively charged peptides. In some embodiments, the nucleic acid condensing agent is spermidine or protamine sulfate.

[0162] In still further embodiments, the formulation further comprises buffered sucrose or phosphate buffered saline.

[0163] “Expression cassette” as used herein means a nucleic acid sequence capable of directing expression of a particular nucleic acid sequence in an appropriate host cell, comprising a promoter operably linked to the nucleic acid sequence of interest which is operably linked to termination signal sequences. It also typically comprises sequences required for proper translation of the nucleic acid sequence. The expression cassette comprising the nucleic acid sequence of interest may be chimeric, meaning that at least one of its components is heterologous with respect to at least one of its other components. The expression cassette may also be one that is naturally occurring but has been obtained in a recombinant form useful for heterologous expression. Typically, however, the expression cassette is heterologous with respect to the host, i.e., the particular nucleic acid sequence of the expression cassette does not occur naturally in the host cell and must have been introduced into the host cell or an ancestor of the host cell by a transformation event. The expression of the nucleic acid sequence in the expression cassette may be under the control of, for example, a constitutive promoter or of an inducible promoter that initiates transcription only when the host cell is exposed to some particular external stimulus. In the case of a multicellular organism, such as a plant, the promoter can also be specific to a particular tissue, or organ, or stage of development.

[0164] A “gene” is a defined region that is located within a genome and that, besides the aforementioned coding sequence, comprises other, primarily regulatory nucleic acid sequences responsible for the control of the expression, that is to say the transcription and translation, of the coding portion. A gene may also comprise other 5′ and 3′ untranslated sequences and termination sequences. Further elements that may be present are, for example, introns.

[0165] As used herein, the term “grower” means a person or entity that is engaged in agriculture, raising living organisms, such as crop plants, for example canola, for food, feed or raw materials.

[0166] A “heterologous” nucleic acid sequence is a nucleic acid sequence not naturally associated with a host cell into which it is introduced, including non-naturally occurring multiple copies of a naturally occurring nucleic acid sequence.

[0167] A “homologous” nucleic acid sequence is a nucleic acid sequence naturally associated with a host cell into which it is introduced.

[0168] “Insecticidal” is defined as a toxic biological activity capable of controlling insects, preferably by killing them.

[0169] An “isolated” nucleic acid molecule or nucleotide sequence or nucleic acid construct or dsRNA molecule or protein of the invention is generally exists apart from its native environment and is therefore not a product of nature. An isolated nucleic acid molecule or nucleotide sequence or nucleic acid construct or dsRNA molecule or protein may exist in a purified form or may exist in a non-native environment such as, for example, a recombinant host or host cell such as a transgenic plant or transgenic plant cell.

[0170] In the context of the invention, a number in front of the suffix “mer” indicates a specified number of subunits. When applied to RNA or DNA, this specifies the number of bases in the molecule. For example, a 19 nucleotide subsequence of an mRNA having the sequence AUGCCACUUCGUUUAGACA is a “19-mer” of SEQ ID NO: 253.

[0171] A “plant” is any plant at any stage of development, particularly a seed plant.

[0172] A “plant cell” is a structural and physiological unit of a plant, comprising a protoplast and a cell wall. The plant cell may be in the form of an isolated single cell or a cultured cell, or as a part of a higher organized unit such as, for example, plant tissue, a plant organ, or a whole plant.

[0173] “Plant cell culture” means cultures of plant units such as, for example, protoplasts, cell culture cells, cells in plant tissues, pollen, pollen tubes, ovules, embryo sacs, zygotes and embryos at various stages of development.

[0174] “Plant material” refers to leaves, stems, roots, flowers or flower parts, fruits, pollen, egg cells, zygotes, seeds, cuttings, cell or tissue cultures, or any other part or product of a plant.

[0175] A “plant organ” is a distinct and visibly structured and differentiated part of a plant such as a root, stem, leaf, flower bud, or embryo.

[0176] “Plant tissue” as used herein means a group of plant cells organized into a structural and functional unit. Any tissue of a plant in planta or in culture is included. This term includes, but is not limited to, whole plants, plant organs, plant seeds, tissue culture and any groups of plant cells organized into structural and/or functional units. The use of this term in conjunction with, or in the absence of, any specific type of plant tissue as listed above or otherwise embraced by this definition is not intended to be exclusive of any other type of plant tissue.

[0177] A flea beetle “transcriptome” is a collection of all or nearly all the ribonucleic acid (RNA) transcripts in a flea beetle cell.

[0178] “Transformation” is a process for introducing heterologous nucleic acid into a host cell or organism. In particular, “transformation” means the stable integration of a DNA molecule into the genome of an organism of interest.

[0179] “Transformed/transgenic/recombinant” refer to a host organism such as a bacterium or a plant into which a heterologous nucleic acid molecule has been introduced. The nucleic acid molecule can be stably integrated into the genome of the host or the nucleic acid molecule can also be present as an extrachromosomal molecule. Such an extrachromosomal molecule can be auto-replicating. Transformed cells, tissues, or plants are understood to encompass not only the end product of a transformation process, but also transgenic progeny thereof. A “non-transformed”, “non-transgenic”, or “non-recombinant” host refers to a wild-type organism, e.g., a bacterium or plant, which does not contain the heterologous nucleic acid molecule.

[0180] The nomenclature used herein for DNA or RNA bases and amino acids is as set forth in 37 C.F.R. § 1.822.

[0181] The invention is based on the unexpected discovery that double stranded RNA (dsRNA) or small interfering RNAs (siRNA) designed to target a mRNA transcribable from the flea beetle genes described herein are toxic to the flea beetle pest and can be used to control flea beetle or Coleopteran infestation of a plant and impart to a transgenic plant tolerance to a flea beetle or Coleopteran infestation. Thus, in one embodiment, the invention provides a double stranded RNA (dsRNA) molecule comprising a sense strand and an antisense strand, wherein a nucleotide sequence of the antisense strand is complementary to a portion of a mRNA polynucleotide transcribable from a flea beetle gene described in the present disclosure, wherein the dsRNA molecule is toxic to a flea beetle or Coleopteran plant pest.

[0182] It is known in the art that dsRNA molecules that are not perfectly complementary to a target sequence (for example, having only 95% identity to the target gene) are effective to control Coleopteran pests (see, for example, Narva et al., U.S. Pat. No. 9,012,722). The invention provides an interfering RNA molecule comprising at least one dsRNA, where the dsRNA is a region of double-stranded RNA comprising annealed at least partially complementary strands. One strand of the dsRNA comprises a sequence of at least 19, at least 20, at least 21, at least 22, at least 23, at least 24, at least 25, at least 26, at least 27, at least 28, at least 29, at least 30, at least 35, at least 40, at least 45, at least 50, at least 55, at least 60, at least 65, at least 70, at least 75, at least 80, at least 85, at least 90, at least 95, at least 100, at least 110, at least 120, at least 130, at least 140, at least 150, at least 160, at least 170, at least 180, at least 190, at least 200, at least 210, at least 220, at least 230, at least 240, at least 250, at least 260, at least 270, at least 280, at least 290, or at least 300 contiguous nucleotides which is at least partially complementary to a target nucleotide sequence within a flea beetle target gene. The interfering RNA molecule (i) has at least 80% identity, at least 85% identity, at least 86% identity, at least 87% identity, at least 88% identity, at least 89% identity, at least 90% identity, at least 91% identity, at least 92% identity, at least 93% identity, at least 94% identity, at least 95% identity, at least 96% identity, at least 97% identity, at least 98% identity, at least 99% identity, or 100% identity, to at least a 19, at least a 20, at least a 21, at least a 22, at least a 23, at least a 24, at least a 25, at least a 26, at least a 27, at least a 28, at least a 29, at least a 30, at least a 35, at least a 40, at least a 45, at least a 50, at least a 55, at least a 60, at least a 65, at least a 70, at least a 75, at least a 80, at least a 85, at least a 90, at least a 95, at least a 100, at least a 110, at least a 120, at least a 130, at least a 140, at least a 150, at least a 160, at least a 170, at least a 180, at least a 190, at least a 200, at least a 210, at least a 220, at least a 230, at least a 240, at least a 250, at least a 260, at least a 270, at least a 280, at least a 290, or at least a 300 contiguous nucleotide fragment of SEQ ID NO: 253-378 or SEQ ID NO: 616-701, or the complement thereof; (ii) comprises at least a 19, at least a 20, at least a 21, at least a 22, at least a 23, at least a 24, at least a 25, at least a 26, at least a 27, at least a 28, at least a 29, at least a 30, at least a 35, at least a 40, at least a 45, at least a 50, at least a 55, at least a 60, at least a 65, at least a 70, at least a 75, at least a 80, at least a 85, at least a 90, at least a 95, at least a 100, at least a 110, at least a 120, at least a 130, at least a 140, at least a 150, at least a 160, at least a 170, at least a 180, at least a 190, at least a 200, at least a 210, at least a 220, at least a 230, at least a 240, at least a 250, at least a 260, at least a 270, at least a 280, at least a 290, or at least a 300 contiguous nucleotide fragment of SEQ ID NO: 253-378 or SEQ ID NO: 616-701, or the complement thereof; (iii) comprises at least a 19, at least a 20, at least a 21, at least a 22, at least a 23, at least a 24, at least a 25, at least a 26, at least a 27, at least a 28, at least a 29, at least a 30, at least a 35, at least a 40, at least a 45, at least a 50, at least a 55, at least a 60, at least a 65, at least a 70, at least a 75, at least a 80, at least a 85, at least a 90, at least a 95, at least a 100, at least a 110, at least a 120, at least a 130, at least a 140, at least a 150, at least a 160, at least a 170, at least a 180, at least a 190, at least a 200, at least a 210, at least a 220, at least a 230, at least a 240, at least a 250, at least a 260, at least a 270, at least a 280, at least a 290, or at least a 300 contiguous nucleotide fragment of a nucleotide sequence encoding an amino acid sequence encoded by SEQ ID NO: 253-378 or SEQ ID NO: 616-701, or the complement thereof, or (iv) can hybridize under stringent conditions to a polynucleotide selected from the group consisting of SEQ ID NO: 253-378 or SEQ ID NO: 616-701, and the complements thereof, wherein the interfering RNA molecule has insecticidal activity on a Coleopteran plant pest, for example a flea beetle insect.

[0183] In some embodiments, the interfering RNA molecule comprises at least two dsRNAs, wherein each dsRNA comprises a sequence of nucleotides which is at least partially complementary to a target nucleotide sequence within the target gene. In some embodiments, each of the dsRNAs comprise a different sequence of nucleotides which is complementary to a different target nucleotide sequence within the target gene. In other embodiments, each of the dsRNAs comprise a different sequence of nucleotides which is complementary to a target nucleotide sequence within two different target genes.

[0184] In some embodiments, the interfering RNA molecule comprises a dsRNA that can comprise, consist essentially of or consist of from at least 18 to about 25 consecutive nucleotides (e.g. 18, 19, 20, 21, 22, 23, 24, 25, 26, 27, 28, or 29) to at least about 300 consecutive nucleotides. Additional nucleotides can be added at the 3′ end, the 5′ end or both the 3′ and 5′ ends to facilitate manipulation of the dsRNA molecule but that do not materially affect the basic characteristics or function of the dsRNA molecule in RNA interference (RNAi).

[0185] In some embodiments, the interfering RNA molecule comprises a dsRNA which comprises an antisense strand that is complementary to at least 19, at least 20, at least 21, at least 22, at least 23, at least 24, at least 25, at least 26, at least 27, at least 28, at least 29, at least 30, at least 35, at least 40, at least 45, at least 50, at least 55, at least 60, at least 65, at least 70, at least 75, at least 80, at least 85, at least 90, at least 95, at least 100, at least 110, at least 120, at least 130, at least 140, at least 150, at least 160, at least 170, at least 180, at least 190, at least 200, at least 210, at least 220, at least 230, at least 240, at least 250, at least 260, at least 270, at least 280, at least 290, or at least 300 consecutive nucleotides of SEQ ID NO: 253-378 or SEQ ID NO: 616-701, or the complement thereof. In other embodiments, the portion of dsRNA comprises, consists essentially of or consists of at least from 19, 20 or 21 consecutive nucleotides to at least 19, at least 20, at least 21, at least 22, at least 23, at least 24, at least 25, at least 26, at least 27, at least 28, at least 29, at least 30, at least 35, at least 40, at least 45, at least 50, at least 55, at least 60, at least 65, at least 70, at least 75, at least 80, at least 85, at least 90, at least 95, at least 100, at least 110, at least 120, at least 130, at least 140, at least 150, at least 160, at least 170, at least 180, at least 190, at least 200, at least 210, at least 220, at least 230, at least 240, at least 250, at least 260, at least 270, at least 280, at least 290, or at least 300 consecutive nucleotides of SEQ ID NO: 253-378 or SEQ ID NO: 616-701, or the complement thereof.

[0186] In other embodiments, an interfering RNA molecule of the invention comprises a dsRNA which comprises, consists essentially of or consists of any 21-mer subsequence of SEQ ID NO: 253-315 or SEQ ID NO: 616-657 consisting of N to N+20 nucleotides, or any complement thereof. For example, an interfering RNA molecule of the invention comprises a dsRNA which comprises, consist essentially of or consists of any 21-mer subsequence of SEQ ID NO: 253, wherein N is nucleotide 1 to nucleotide 2299 of SEQ ID NO: 253, or any complement thereof. In other words, the portion of the mRNA that is targeted comprises any of the 2299 21 consecutive nucleotide subsequences i.e. 21-mers) of SEQ ID NO: 253, or any of their complementing sequences. It will be recognized that these 2299 21 consecutive nucleotide subsequences include all possible 21 consecutive nucleotide subsequences from SEQ ID NO: 253 and from SEQ ID NO: 316, and their complements, as SEQ ID NO's 253 and 316 are all to the same target, namely Pc1, which also may be referred to as a P. chrysocephala ortholog of Sec23. It will similarly be recognized that all 21-mer subsequences of SEQ ID NO: 253-315 or SEQ ID NO: 616-657, and all complement subsequences thereof, include all possible 21 consecutive nucleotide subsequences of SEQ ID NO: 316-378 or SEQ ID NO: 658-701, and the complement subsequences thereof.

[0187] Similarly, an interfering RNA molecule of the invention comprises a dsRNA which comprises, consist essentially of or consists of any 21-mer subsequence of SEQ ID NO: 254, wherein N is nucleotide 1 to nucleotide 2701 of SEQ ID NO: 254, or any complement thereof. Another interfering RNA molecule of the invention comprises a dsRNA which comprises, consist essentially of or consists of any 21-mer subsequence of SEQ ID NO: 255, wherein N is nucleotide 1 to nucleotide 2848 of SEQ ID NO: 255, or any complement thereof. Another interfering RNA molecule of the invention comprises a dsRNA which comprises, consist essentially of or consists of any 21-mer subsequence of SEQ ID NO: 256, wherein N is nucleotide 1 to nucleotide 595 of SEQ ID NO: 256, or any complement thereof. Another interfering RNA molecule of the invention comprises a dsRNA which comprises, consist essentially of or consists of any 21-mer subsequence of SEQ ID NO: 257, wherein N is nucleotide 1 to nucleotide 583 of SEQ ID NO: 257, or any complement thereof. Another interfering RNA molecule of the invention comprises a dsRNA which comprises, consist essentially of or consists of any 21-mer subsequence of SEQ ID NO: 258, wherein N is nucleotide 1 to nucleotide 536 of SEQ ID NO: 258, or any complement thereof. Another interfering RNA molecule of the invention comprises a dsRNA which comprises, consist essentially of or consists of any 21-mer subsequence of SEQ ID NO: 259, wherein N is nucleotide 1 to nucleotide 748 of SEQ ID NO: 259, or any complement thereof. Another interfering RNA molecule of the invention comprises a dsRNA which comprises, consist essentially of or consists of any 21-mer subsequence of SEQ ID NO: 260, wherein N is nucleotide 1 to nucleotide 658 of SEQ ID NO: 260, or any complement thereof. Another interfering RNA molecule of the invention comprises a dsRNA which comprises, consist essentially of or consists of any 21-mer subsequence of SEQ ID NO: 261, wherein N is nucleotide 1 to nucleotide 727 of SEQ ID NO: 261, or any complement thereof. Another interfering RNA molecule of the invention comprises a dsRNA which comprises, consist essentially of or consists of any 21-mer subsequence of SEQ ID NO: 262, wherein N is nucleotide 1 to nucleotide 2818 of SEQ ID NO: 262, or any complement thereof. Another interfering RNA molecule of the invention comprises a dsRNA which comprises, consist essentially of or consists of any 21-mer subsequence of SEQ ID NO: 263, wherein N is nucleotide 1 to nucleotide 367 of SEQ ID NO: 263, or any complement thereof. Another interfering RNA molecule of the invention comprises a dsRNA which comprises, consist essentially of or consists of any 21-mer subsequence of SEQ ID NO: 264, wherein N is nucleotide 1 to nucleotide 2620 of SEQ ID NO: 264, or any complement thereof. Another interfering RNA molecule of the invention comprises a dsRNA which comprises, consist essentially of or consists of any 21-mer subsequence of SEQ ID NO: 265, wherein N is nucleotide 1 to nucleotide 1264 of SEQ ID NO: 265, or any complement thereof. Another interfering RNA molecule of the invention comprises a dsRNA which comprises, consist essentially of or consists of any 21-mer subsequence of SEQ ID NO: 266, wherein N is nucleotide 1 to nucleotide 646 of SEQ ID NO: 266, or any complement thereof. Another interfering RNA molecule of the invention comprises a dsRNA which comprises, consist essentially of or consists of any 21-mer subsequence of SEQ ID NO: 267, wherein N is nucleotide 1 to nucleotide 589 of SEQ ID NO: 267, or any complement thereof. Another interfering RNA molecule of the invention comprises a dsRNA which comprises, consist essentially of or consists of any 21-mer subsequence of SEQ ID NO: 268, wherein N is nucleotide 1 to nucleotide 631 of SEQ ID NO: 268, or any complement thereof. Another interfering RNA molecule of the invention comprises a dsRNA which comprises, consist essentially of or consists of any 21-mer subsequence of SEQ ID NO: 269, wherein N is nucleotide 1 to nucleotide 529 of SEQ ID NO: 269, or any complement thereof. Another interfering RNA molecule of the invention comprises a dsRNA which comprises, consist essentially of or consists of any 21-mer subsequence of SEQ ID NO: 270, wherein N is nucleotide 1 to nucleotide 480 of SEQ ID NO: 270, or any complement thereof. Another interfering RNA molecule of the invention comprises a dsRNA which comprises, consist essentially of or consists of any 21-mer subsequence of SEQ ID NO: 271, wherein N is nucleotide 1 to nucleotide 3325 of SEQ ID NO: 271, or any complement thereof. Another interfering RNA molecule of the invention comprises a dsRNA which comprises, consist essentially of or consists of any 21-mer subsequence of SEQ ID NO: 272, wherein N is nucleotide 1 to nucleotide 535 of SEQ ID NO: 272, or any complement thereof. Another interfering RNA molecule of the invention comprises a dsRNA which comprises, consist essentially of or consists of any 21-mer subsequence of SEQ ID NO: 273, wherein N is nucleotide 1 to nucleotide 295 of SEQ ID NO: 273, or any complement thereof. Another interfering RNA molecule of the invention comprises a dsRNA which comprises, consist essentially of or consists of any 21-mer subsequence of SEQ ID NO: 274, wherein N is nucleotide 1 to nucleotide 1294 of SEQ ID NO: 274, or any complement thereof. Another interfering RNA molecule of the invention comprises a dsRNA which comprises, consist essentially of or consists of any 21-mer subsequence of SEQ ID NO: 275, wherein N is nucleotide 1 to nucleotide 895 of SEQ ID NO: 275, or any complement thereof. Another interfering RNA molecule of the invention comprises a dsRNA which comprises, consist essentially of or consists of any 21-mer subsequence of SEQ ID NO: 276, wherein N is nucleotide 1 to nucleotide 2851 of SEQ ID NO: 276, or any complement thereof. Another interfering RNA molecule of the invention comprises a dsRNA which comprises, consist essentially of or consists of any 21-mer subsequence of SEQ ID NO: 277, wherein N is nucleotide 1 to nucleotide 562 of SEQ ID NO: 277, or any complement thereof. Another interfering RNA molecule of the invention comprises a dsRNA which comprises, consist essentially of or consists of any 21-mer subsequence of SEQ ID NO: 278, wherein N is nucleotide 1 to nucleotide 583 of SEQ ID NO: 278, or any complement thereof. Another interfering RNA molecule of the invention comprises a dsRNA which comprises, consist essentially of or consists of any 21-mer subsequence of SEQ ID NO: 279, wherein N is nucleotide 1 to nucleotide 577 of SEQ ID NO: 279, or any complement thereof. Another interfering RNA molecule of the invention comprises a dsRNA which comprises, consist essentially of or consists of any 21-mer subsequence of SEQ ID NO: 280, wherein N is nucleotide 1 to nucleotide 775 of SEQ ID NO: 280, or any complement thereof. Another interfering RNA molecule of the invention comprises a dsRNA which comprises, consist essentially of or consists of any 21-mer subsequence of SEQ ID NO: 281, wherein N is nucleotide 1 to nucleotide 484 of SEQ ID NO: 281, or any complement thereof. Another interfering RNA molecule of the invention comprises a dsRNA which comprises, consist essentially of or consists of any 21-mer subsequence of SEQ ID NO: 282, wherein N is nucleotide 1 to nucleotide 727 of SEQ ID NO: 282, or any complement thereof. Another interfering RNA molecule of the invention comprises a dsRNA which comprises, consist essentially of or consists of any 21-mer subsequence of SEQ ID NO: 283, wherein N is nucleotide 1 to nucleotide 2998 of SEQ ID NO: 283, or any complement thereof. Another interfering RNA molecule of the invention comprises a dsRNA which comprises, consist essentially of or consists of any 21-mer subsequence of SEQ ID NO: 284, wherein N is nucleotide 1 to nucleotide 367 of SEQ ID NO: 284, or any complement thereof. Another interfering RNA molecule of the invention comprises a dsRNA which comprises, consist essentially of or consists of any 21-mer subsequence of SEQ ID NO: 285, wherein N is nucleotide 1 to nucleotide 1801 of SEQ ID NO: 285, or any complement thereof. Another interfering RNA molecule of the invention comprises a dsRNA which comprises, consist essentially of or consists of any 21-mer subsequence of SEQ ID NO: 286, wherein N is nucleotide 1 to nucleotide 484 of SEQ ID NO: 286, or any complement thereof. Another interfering RNA molecule of the invention comprises a dsRNA which comprises, consist essentially of or consists of any 21-mer subsequence of SEQ ID NO: 287, wherein N is nucleotide 1 to nucleotide 622 of SEQ ID NO: 287, or any complement thereof. Another interfering RNA molecule of the invention comprises a dsRNA which comprises, consist essentially of or consists of any 21-mer subsequence of SEQ ID NO: 288, wherein N is nucleotide 1 to nucleotide 589 of SEQ ID NO: 288, or any complement thereof. Another interfering RNA molecule of the invention comprises a dsRNA which comprises, consist essentially of or consists of any 21-mer subsequence of SEQ ID NO: 289, wherein N is nucleotide 1 to nucleotide 349 of SEQ ID NO: 289, or any complement thereof. Another interfering RNA molecule of the invention comprises a dsRNA which comprises, consist essentially of or consists of any 21-mer subsequence of SEQ ID NO: 290, wherein N is nucleotide 1 to nucleotide 529 of SEQ ID NO: 290, or any complement thereof. Another interfering RNA molecule of the invention comprises a dsRNA which comprises, consist essentially of or consists of any 21-mer subsequence of SEQ ID NO: 291, wherein N is nucleotide 1 to nucleotide 5035 of SEQ ID NO: 291, or any complement thereof. Another interfering RNA molecule of the invention comprises a dsRNA which comprises, consist essentially of or consists of any 21-mer subsequence of SEQ ID NO: 292, wherein N is nucleotide 1 to nucleotide 2488 of SEQ ID NO: 292, or any complement thereof. Another interfering RNA molecule of the invention comprises a dsRNA which comprises, consist essentially of or consists of any 21-mer subsequence of SEQ ID NO: 293, wherein N is nucleotide 1 to nucleotide 532 of SEQ ID NO: 293, or any complement thereof. Another interfering RNA molecule of the invention comprises a dsRNA which comprises, consist essentially of or consists of any 21-mer subsequence of SEQ ID NO: 294, wherein N is nucleotide 1 to nucleotide 295 of SEQ ID NO: 294, or any complement thereof. Another interfering RNA molecule of the invention comprises a dsRNA which comprises, consist essentially of or consists of any 21-mer subsequence of SEQ ID NO: 295, wherein N is nucleotide 1 to nucleotide 2311 of SEQ ID NO: 295, or any complement thereof. Another interfering RNA molecule of the invention comprises a dsRNA which comprises, consist essentially of or consists of any 21-mer subsequence of SEQ ID NO: 296, wherein N is nucleotide 1 to nucleotide 2698 of SEQ ID NO: 296, or any complement thereof. Another interfering RNA molecule of the invention comprises a dsRNA which comprises, consist essentially of or consists of any 21-mer subsequence of SEQ ID NO: 297, wherein N is nucleotide 1 to nucleotide 2851 of SEQ ID NO: 297, or any complement thereof. Another interfering RNA molecule of the invention comprises a dsRNA which comprises, consist essentially of or consists of any 21-mer subsequence of SEQ ID NO: 298, wherein N is nucleotide 1 to nucleotide 729 of SEQ ID NO: 298, or any complement thereof. Another interfering RNA molecule of the invention comprises a dsRNA which comprises, consist essentially of or consists of any 21-mer subsequence of SEQ ID NO: 299, wherein N is nucleotide 1 to nucleotide 583 of SEQ ID NO: 299, or any complement thereof. Another interfering RNA molecule of the invention comprises a dsRNA which comprises, consist essentially of or consists of any 21-mer subsequence of SEQ ID NO: 300, wherein N is nucleotide 1 to nucleotide 592 of SEQ ID NO: 300, or any complement thereof. Another interfering RNA molecule of the invention comprises a dsRNA which comprises, consist essentially of or consists of any 21-mer subsequence of SEQ ID NO: 301, wherein N is nucleotide 1 to nucleotide 775 of SEQ ID NO: 301, or any complement thereof. Another interfering RNA molecule of the invention comprises a dsRNA which comprises, consist essentially of or consists of any 21-mer subsequence of SEQ ID NO: 302, wherein N is nucleotide 1 to nucleotide 658 of SEQ ID NO: 302, or any complement thereof. Another interfering RNA molecule of the invention comprises a dsRNA which comprises, consist essentially of or consists of any 21-mer subsequence of SEQ ID NO: 303, wherein N is nucleotide 1 to nucleotide 727 of SEQ ID NO: 303, or any complement thereof. Another interfering RNA molecule of the invention comprises a dsRNA which comprises, consist essentially of or consists of any 21-mer subsequence of SEQ ID NO: 304, wherein N is nucleotide 1 to nucleotide 3001 of SEQ ID NO: 304, or any complement thereof. Another interfering RNA molecule of the invention comprises a dsRNA which comprises, consist essentially of or consists of any 21-mer subsequence of SEQ ID NO: 305, wherein N is nucleotide 1 to nucleotide 367 of SEQ ID NO: 305, or any complement thereof. Another interfering RNA molecule of the invention comprises a dsRNA which comprises, consist essentially of or consists of any 21-mer subsequence of SEQ ID NO: 306, wherein N is nucleotide 1 to nucleotide 2617 of SEQ ID NO: 306, or any complement thereof. Another interfering RNA molecule of the invention comprises a dsRNA which comprises, consist essentially of or consists of any 21-mer subsequence of SEQ ID NO: 307, wherein N is nucleotide 1 to nucleotide 1264 of SEQ ID NO: 307, or any complement thereof. Another interfering RNA molecule of the invention comprises a dsRNA which comprises, consist essentially of or consists of any 21-mer subsequence of SEQ ID NO: 308, wherein N is nucleotide 1 to nucleotide 640 of SEQ ID NO: 308, or any complement thereof. Another interfering RNA molecule of the invention comprises a dsRNA which comprises, consist essentially of or consists of any 21-mer subsequence of SEQ ID NO: 309, wherein N is nucleotide 1 to nucleotide 589 of SEQ ID NO: 309, or any complement thereof. Another interfering RNA molecule of the invention comprises a dsRNA which comprises, consist essentially of or consists of any 21-mer subsequence of SEQ ID NO: 310, wherein N is nucleotide 1 to nucleotide 631 of SEQ ID NO: 310, or any complement thereof. Another interfering RNA molecule of the invention comprises a dsRNA which comprises, consist essentially of or consists of any 21-mer subsequence of SEQ ID NO: 311, wherein N is nucleotide 1 to nucleotide 529 of SEQ ID NO: 311, or any complement thereof. Another interfering RNA molecule of the invention comprises a dsRNA which comprises, consist essentially of or consists of any 21-mer subsequence of SEQ ID NO: 312, wherein N is nucleotide 1 to nucleotide 5035 of SEQ ID NO: 312, or any complement thereof. Another interfering RNA molecule of the invention comprises a dsRNA which comprises, consist essentially of or consists of any 21-mer subsequence of SEQ ID NO: 313, wherein N is nucleotide 1 to nucleotide 3652 of SEQ ID NO: 313, or any complement thereof. Another interfering RNA molecule of the invention comprises a dsRNA which comprises, consist essentially of or consists of any 21-mer subsequence of SEQ ID NO: 314, wherein N is nucleotide 1 to nucleotide 532 of SEQ ID NO: 314, or any complement thereof. Another interfering RNA molecule of the invention comprises a dsRNA which comprises, consist essentially of or consists of any 21-mer subsequence of SEQ ID NO: 315, wherein N is nucleotide 1 to nucleotide 295 of SEQ ID NO: 315, or any complement thereof. Another interfering RNA molecule of the invention comprises a dsRNA which comprises, consist essentially of or consists of any 21-mer subsequence of SEQ ID NO: 616, wherein N is nucleotide 1 to nucleotide 2314 of SEQ ID NO: 616, or any complement thereof. Another interfering RNA molecule of the invention comprises a dsRNA which comprises, consist essentially of or consists of any 21-mer subsequence of SEQ ID NO: 617, wherein N is nucleotide 1 to nucleotide 2701 of SEQ ID NO: 617, or any complement thereof. Another interfering RNA molecule of the invention comprises a dsRNA which comprises, consist essentially of or consists of any 21-mer subsequence of SEQ ID NO: 618, wherein N is nucleotide 1 to nucleotide 2851 of SEQ ID NO: 618, or any complement thereof. Another interfering RNA molecule of the invention comprises a dsRNA which comprises, consist essentially of or consists of any 21-mer subsequence of SEQ ID NO: 619, wherein N is nucleotide 1 to nucleotide 799 of SEQ ID NO: 619, or any complement thereof. Another interfering RNA molecule of the invention comprises a dsRNA which comprises, consist essentially of or consists of any 21-mer subsequence of SEQ ID NO: 620, wherein N is nucleotide 1 to nucleotide 583 of SEQ ID NO: 620, or any complement thereof. Another interfering RNA molecule of the invention comprises a dsRNA which comprises, consist essentially of or consists of any 21-mer subsequence of SEQ ID NO: 621, wherein N is nucleotide 1 to nucleotide 536 of SEQ ID NO: 621, or any complement thereof. Another interfering RNA molecule of the invention comprises a dsRNA which comprises, consist essentially of or consists of any 21-mer subsequence of SEQ ID NO: 622, wherein N is nucleotide 1 to nucleotide 696 of SEQ ID NO: 622, or any complement thereof. Another interfering RNA molecule of the invention comprises a dsRNA which comprises, consist essentially of or consists of any 21-mer subsequence of SEQ ID NO: 623, wherein N is nucleotide 1 to nucleotide 492 of SEQ ID NO: 623, or any complement thereof. Another interfering RNA molecule of the invention comprises a dsRNA which comprises, consist essentially of or consists of any 21-mer subsequence of SEQ ID NO: 624, wherein N is nucleotide 1 to nucleotide 727 of SEQ ID NO: 624, or any complement thereof. Another interfering RNA molecule of the invention comprises a dsRNA which comprises, consist essentially of or consists of any 21-mer subsequence of SEQ ID NO: 625, wherein N is nucleotide 1 to nucleotide 2998 of SEQ ID NO: 625, or any complement thereof. Another interfering RNA molecule of the invention comprises a dsRNA which comprises, consist essentially of or consists of any 21-mer subsequence of SEQ ID NO: 626, wherein N is nucleotide 1 to nucleotide 367 of SEQ ID NO: 626, or any complement thereof. Another interfering RNA molecule of the invention comprises a dsRNA which comprises, consist essentially of or consists of any 21-mer subsequence of SEQ ID NO: 627, wherein N is nucleotide 1 to nucleotide 2620 of SEQ ID NO: 627, or any complement thereof. Another interfering RNA molecule of the invention comprises a dsRNA which comprises, consist essentially of or consists of any 21-mer subsequence of SEQ ID NO: 628, wherein N is nucleotide 1 to nucleotide 1264 of SEQ ID NO: 628, or any complement thereof. Another interfering RNA molecule of the invention comprises a dsRNA which comprises, consist essentially of or consists of any 21-mer subsequence of SEQ ID NO: 629, wherein N is nucleotide 1 to nucleotide 640 of SEQ ID NO: 629, or any complement thereof. Another interfering RNA molecule of the invention comprises a dsRNA which comprises, consist essentially of or consists of any 21-mer subsequence of SEQ ID NO: 630, wherein N is nucleotide 1 to nucleotide 589 of SEQ ID NO: 630, or any complement thereof. Another interfering RNA molecule of the invention comprises a dsRNA which comprises, consist essentially of or consists of any 21-mer subsequence of SEQ ID NO: 631, wherein N is nucleotide 1 to nucleotide 631 of SEQ ID NO: 631, or any complement thereof. Another interfering RNA molecule of the invention comprises a dsRNA which comprises, consist essentially of or consists of any 21-mer subsequence of SEQ ID NO: 632, wherein N is nucleotide 1 to nucleotide 529 of SEQ ID NO: 632, or any complement thereof. Another interfering RNA molecule of the invention comprises a dsRNA which comprises, consist essentially of or consists of any 21-mer subsequence of SEQ ID NO: 633, wherein N is nucleotide 1 to nucleotide 4587 of SEQ ID NO: 633, or any complement thereof. Another interfering RNA molecule of the invention comprises a dsRNA which comprises, consist essentially of or consists of any 21-mer subsequence of SEQ ID NO: 634, wherein N is nucleotide 1 to nucleotide 3652 of SEQ ID NO: 634, or any complement thereof. Another interfering RNA molecule of the invention comprises a dsRNA which comprises, consist essentially of or consists of any 21-mer subsequence of SEQ ID NO: 635, wherein N is nucleotide 1 to nucleotide 532 of SEQ ID NO: 635, or any complement thereof. Another interfering RNA molecule of the invention comprises a dsRNA which comprises, consist essentially of or consists of any 21-mer subsequence of SEQ ID NO: 636, wherein N is nucleotide 1 to nucleotide 295 of SEQ ID NO: 636, or any complement thereof. Another interfering RNA molecule of the invention comprises a dsRNA which comprises, consist essentially of or consists of any 21-mer subsequence of SEQ ID NO: 637, wherein N is nucleotide 1 to nucleotide 2320 of SEQ ID NO: 637, or any complement thereof. Another interfering RNA molecule of the invention comprises a dsRNA which comprises, consist essentially of or consists of any 21-mer subsequence of SEQ ID NO: 638, wherein N is nucleotide 1 to nucleotide 2698 of SEQ ID NO: 638, or any complement thereof. Another interfering RNA molecule of the invention comprises a dsRNA which comprises, consist essentially of or consists of any 21-mer subsequence of SEQ ID NO: 639, wherein N is nucleotide 1 to nucleotide 2804 of SEQ ID NO: 639, or any complement thereof. Another interfering RNA molecule of the invention comprises a dsRNA which comprises, consist essentially of or consists of any 21-mer subsequence of SEQ ID NO: 640, wherein N is nucleotide 1 to nucleotide 1501 of SEQ ID NO: 640, or any complement thereof. Another interfering RNA molecule of the invention comprises a dsRNA which comprises, consist essentially of or consists of any 21-mer subsequence of SEQ ID NO: 641, wherein N is nucleotide 1 to nucleotide 583 of SEQ ID NO: 641, or any complement thereof. Another interfering RNA molecule of the invention comprises a dsRNA which comprises, consist essentially of or consists of any 21-mer subsequence of SEQ ID NO: 642, wherein N is nucleotide 1 to nucleotide 464 of SEQ ID NO: 642, or any complement thereof. Another interfering RNA molecule of the invention comprises a dsRNA which comprises, consist essentially of or consists of any 21-mer subsequence of SEQ ID NO: 643, wherein N is nucleotide 1 to nucleotide 775 of SEQ ID NO: 643, or any complement thereof. Another interfering RNA molecule of the invention comprises a dsRNA which comprises, consist essentially of or consists of any 21-mer subsequence of SEQ ID NO: 644, wherein N is nucleotide 1 to nucleotide 658 of SEQ ID NO: 644, or any complement thereof. Another interfering RNA molecule of the invention comprises a dsRNA which comprises, consist essentially of or consists of any 21-mer subsequence of SEQ ID NO: 645, wherein N is nucleotide 1 to nucleotide 727 of SEQ ID NO: 645, or any complement thereof. Another interfering RNA molecule of the invention comprises a dsRNA which comprises, consist essentially of or consists of any 21-mer subsequence of SEQ ID NO: 646, wherein N is nucleotide 1 to nucleotide 3001 of SEQ ID NO: 646, or any complement thereof. Another interfering RNA molecule of the invention comprises a dsRNA which comprises, consist essentially of or consists of any 21-mer subsequence of SEQ ID NO: 647, wherein N is nucleotide 1 to nucleotide 364 of SEQ ID NO: 647, or any complement thereof. Another interfering RNA molecule of the invention comprises a dsRNA which comprises, consist essentially of or consists of any 21-mer subsequence of SEQ ID NO: 648, wherein N is nucleotide 1 to nucleotide 2620 of SEQ ID NO: 648, or any complement thereof. Another interfering RNA molecule of the invention comprises a dsRNA which comprises, consist essentially of or consists of any 21-mer subsequence of SEQ ID NO: 649, wherein N is nucleotide 1 to nucleotide 1264 of SEQ ID NO: 649, or any complement thereof. Another interfering RNA molecule of the invention comprises a dsRNA which comprises, consist essentially of or consists of any 21-mer subsequence of SEQ ID NO: 650, wherein N is nucleotide 1 to nucleotide 640 of SEQ ID NO: 650, or any complement thereof. Another interfering RNA molecule of the invention comprises a dsRNA which comprises, consist essentially of or consists of any 21-mer subsequence of SEQ ID NO: 651, wherein N is nucleotide 1 to nucleotide 589 of SEQ ID NO: 651, or any complement thereof. Another interfering RNA molecule of the invention comprises a dsRNA which comprises, consist essentially of or consists of any 21-mer subsequence of SEQ ID NO: 652, wherein N is nucleotide 1 to nucleotide 631 of SEQ ID NO: 652, or any complement thereof. Another interfering RNA molecule of the invention comprises a dsRNA which comprises, consist essentially of or consists of any 21-mer subsequence of SEQ ID NO: 653, wherein N is nucleotide 1 to nucleotide 529 of SEQ ID NO: 653, or any complement thereof. Another interfering RNA molecule of the invention comprises a dsRNA which comprises, consist essentially of or consists of any 21-mer subsequence of SEQ ID NO: 654, wherein N is nucleotide 1 to nucleotide 4471 of SEQ ID NO: 654, or any complement thereof. Another interfering RNA molecule of the invention comprises a dsRNA which comprises, consist essentially of or consists of any 21-mer subsequence of SEQ ID NO: 655, wherein N is nucleotide 1 to nucleotide 3652 of SEQ ID NO: 655, or any complement thereof. Another interfering RNA molecule of the invention comprises a dsRNA which comprises, consist essentially of or consists of any 21-mer subsequence of SEQ ID NO: 656, wherein N is nucleotide 1 to nucleotide 526 of SEQ ID NO: 656, or any complement thereof. Another interfering RNA molecule of the invention comprises a dsRNA which comprises, consist essentially of or consists of any 21-mer subsequence of SEQ ID NO: 657, wherein N is nucleotide 1 to nucleotide 295 of SEQ ID NO: 657, or any complement thereof.

[0188] In still other embodiments, the interfering RNA molecule of the invention comprises a dsRNA which comprises, consists essentially of or consists of SEQ ID NO: 253-378 or SEQ ID NO: 616-701, or the complement thereof.

[0189] In other embodiments of the interfering RNA molecule of the invention, the nucleotide sequence of the antisense strand of a dsRNA of the invention comprises, consists essentially of or consists of the complementary RNA sequence of SEQ ID NO: 253-378 or SEQ ID NO: 616-701. The nucleotide sequence of the antisense strand of a dsRNA of the invention can have one nucleotide at either the 3′ or 5′ end deleted or can have up to six nucleotides added at the 3′ end, the 5′ end or both, in any combination to achieve an antisense strand consisting essentially of any 19-mer, any 20-mer, or any 21-mer nucleotide sequence of SEQ ID NO: 253-378 or SEQ ID NO: 616-701, as it would be understood that the deletion of the one nucleotide or the addition of up to the six nucleotides do not materially affect the basic characteristics or function of the double stranded RNA molecule of the invention. Such additional nucleotides can be nucleotides that extend the complementarity of the antisense strand along the target sequence and/or such nucleotides can be nucleotides that facilitate manipulation of the RNA molecule or a nucleic acid molecule encoding the RNA molecule, as would be known to one of ordinary skill in the art. For example, a TT overhang at the 3′ end may be present, which is used to stabilize the siRNA duplex and does not affect the specificity of the siRNA.

[0190] In some embodiments of this invention, the antisense strand of the double stranded RNA of the interfering RNA molecule can be fully complementary to the target RNA polynucleotide or the antisense strand can be substantially complementary or partially complementary to the target RNA polynucleotide. The dsRNA of the interfering RNA molecule may comprise a dsRNA which is a region of double-stranded RNA comprising substantially complementary annealed strands, or which is a region of double-stranded RNA comprising fully complementary annealed strands. By substantially or partially complementary is meant that the antisense strand and the target RNA polynucleotide can be mismatched at about 1, 2, 3, 4, 5, 6, 7, 8, 9, or 10 nucleotide pairings. Such mismatches can be introduced into the antisense strand sequence, e.g., near the 3′ end, to enhance processing of the double stranded RNA molecule by Dicer, to duplicate a pattern of mismatches in a siRNA molecule inserted into a chimeric nucleic acid molecule or artificial microRNA precursor molecule of this invention, and the like, as would be known to one of skill in the art. Such modification will weaken the base pairing at one end of the duplex and generate strand asymmetry, therefore enhancing the chance of the antisense strand, instead of the sense strand, being processed and silencing the intended gene (Geng and Ding “Double-mismatched siRNAs enhance selective gene silencing of a mutant ALS-causing Allelel” Acta Pharmacol. Sin. 29:211-216 (2008); Schwarz et al. “Asymmetry in the assembly of the RNAi enzyme complex” Cell 115:199-208 (2003)).

[0191] In some embodiments of this invention, the interfering RNA comprises a dsRNA which comprises a short hairpin RNA (shRNA) molecule. Expression of shRNA in cells is typically accomplished by delivery of plasmids or recombinant vectors, for example in transgenic plants such as transgenic canola.

[0192] The invention encompasses a nucleic acid construct comprising an interfering RNA of the invention. The invention further encompasses a nucleic acid molecule encoding at least one interfering molecule of the invention. The invention further encompasses a nucleic acid construct comprising at least one interfering molecule of the invention or comprising a nucleic acid molecule encoding the at least one interfering molecule of the invention. The invention further encompasses a nucleic acid construct wherein the nucleic acid construct is an expression vector. The invention further encompasses a recombinant vector comprising a regulatory sequence operably linked to a nucleotide sequence that encodes an interfering RNA molecule of the invention. A regulatory sequence may refer to a promoter, enhancer, transcription factor binding site, insulator, silencer, or any other DNA element involved in the expression of a gene.

[0193] The invention further encompasses chimeric nucleic acid molecules comprising an interfering RNA molecule with an antisense strand of a dsRNA operably linked with a plant microRNA precursor molecule. In some embodiments, the chimeric nucleic acid molecule comprises an antisense strand having the nucleotide sequence of any of the 21-mer subsequences complementary to SEQ ID NOs: 253-378, or SEQ ID NO: 616-701, or any complement thereof, operably linked with a plant microRNA precursor molecule. In some embodiments, the plant microRNA precursor molecule is a canola microRNA precursor.

[0194] The use of artificial plant microRNAs to deliver a nucleotide sequence of interest (e.g an artificial miRNA; siRNA/siRNA*) into a plant is known in the art (see, e.g., Schwab et al. 2006. The Plant Cell 18:1121-1133 and Examples section herein). In the invention, the artificial microRNAs are chimeric or hybrid molecules, having a plant microRNA precursor backbone and an insect siRNA sequence inserted therein. As would be understood by one of ordinary skill in the art, it is typically desirable to maintain mismatches that normally occur in the plant microRNA precursor sequence in any nucleotide sequence that is substituted into the plant microRNA precursor backbone. In still other embodiments, the artificial plant microRNA precursor comprises portions of a canola microRNA precursor molecule. Any canola microRNA (miRNA) precursor is suitable for the compositions and methods of the invention. Non-limiting examples include miR156, miR159, miR166, miR167, miR168, miR169, miR171, miR172, miR319, miR390, miR393, miR394, miR395, miR396, miR397, miR398, miR399, miR408, miR482, miR528, miR529, miR827, miR838, miR1432, as well as any other plant miRNA precursors now known or later identified.

[0195] In some embodiments, the invention encompasses interfering RNA molecules, nucleic acid constructs, nucleic acid molecules or recombinant vectors comprising at least one strand of a dsRNA of an interfering RNA molecule of the invention, or comprising a chimeric nucleic acid molecule of the invention, or comprising an artificial plant microRNA of the invention. In some embodiments the nucleic acid construct comprises a nucleic acid molecule of the invention. In other embodiments, the nucleic acid construct is a recombinant expression vector.

[0196] In some embodiments, the interfering RNA molecules of the invention have insecticidal activity on an insect, namely a flea beetle, from the tribe Alticini. In some embodiments, the interfering RNA molecules of the present invention have activity on an insect which is species of a genus selected from the group consisting of the genera Altica, Anthobiodes, Aphthona, Aphthonaltica, Aphthonoides, Apteopeda, Argopistes, Argopus, Arrhenocoela, Batophila, Blepharida, Chaetocnema, Clitea, Crepidodera, Derocrepis, Dibolia, Disonycha, Epitrix, Hermipyxis, Hermaeophaga, Hespera, Hippuriphila, Horaia, Hyphasis, Lipromima, Liprus, Longitarsus, Luperomorpha, Lythraria, Manobia, Mantura, Meishania, Minota, Mniophila, Neicrepidodera, Nonarthra, Novofoudrasia, Ochrosis, Oedionychis, Oglobinia, Omeisphaera, Ophrida, Orestia, Paragopus, Pentamesa, Philopona, Phygasia, Phyllotreta, Podagrica, Podagricomela, Podontia, Pseudodera, Psylliodes, Sangariola, Sinaltica, Sphaeroderma, Systena, Trachyaphthona, Xuthea, and Zipangia. In embodiments, the insect is a species selected from the group consisting of Altica ambiens (alder flea beetle), Altica canadensis (prairie flea beetle), Altica chalybaea (grape flea beetle), Altica prasina (poplar flea beetle), Altica rosae (rose flea beetle), Altica sylvia (blueberry flea beetle), Altica ulmi (elm flea beetle), Chaetocnema pulicaria (corn flea beetle), Chaetocnema conofinis (sweet potato flea beetle), Epitrix cucumeris (potato flea beetle), Systena blanda (palestripped flea beetle), and Systena frontalis (redheaded flea beetle). In embodiments, the insect is a species selected from the group consisting of Phyllotreta armoraciae (horseradish flea beetle), Phyllotreta cruciferae (canola flea beetle), Phyllotreta pusilla (western black flea beetle), Phyllotreta nemorum (striped turnip flea beetle), Phyllotreta atra (turnip flea beetle), Phyllotreta robusta (garden flea beetle), Phyllotreta striolata (striped flea beetle), Phyllotreta undulata, Psylliodes chrysocephala, and Psylliodes punctulata (hop flea beetle). In some embodiments, the coding sequence of the target gene comprises a sequence selected from the group comprising SEQ ID NO: 1-63 or SEQ ID NO: 442-483.

[0197] In some embodiments, the invention encompasses a composition comprising one or more or two or more of the interfering RNA molecules of the invention. In some embodiments, the interfering RNA molecules are present on the same nucleic acid construct, on different nucleic acid constructs, or any combination thereof. For example, one interfering RNA molecule of the invention may be present on a nucleic acid construct, and a second interfering RNA molecule of the invention may be present on the same nucleic acid construct or on a separate, second nucleic acid construct. The second interfering RNA molecule of the invention may be to the same target gene or to a different target gene.

[0198] In some embodiments, the invention encompasses a composition comprising an interfering RNA molecule which comprises at least one dsRNA wherein the dsRNA is a region of double-stranded RNA comprising annealed complementary strands. One strand of the dsRNA comprises a sequence of at least 19, at least 20, at least 21, at least 22, at least 23, at least 24, at least 25, at least 26, at least 27, at least 28, at least 29, at least 30, at least 35, at least 40, at least 45, at least 50, at least 55, at least 60, at least 65, at least 70, at least 75, at least 80, at least 85, at least 90, at least 95, at least 100, at least 110, at least 120, at least 130, at least 140, at least 150, at least 160, at least 170, at least 180, at least 190, at least 200, at least 210, at least 220, at least 230, at least 240, at least 250, at least 260, at least 270, at least 280, at least 290, or at least 300 contiguous nucleotides which is at least partially complementary to a target nucleotide sequence within a flea beetle target gene. The interfering RNA molecule (i) has at least 80% identity, at least 85% identity, at least 86% identity, at least 87% identity, at least 88% identity, at least 89% identity, at least 90% identity, at least 91% identity, at least 92% identity, at least 93% identity, at least 94% identity, at least 95% identity, at least 96% identity, at least 97% identity, at least 98% identity, at least 99% identity, or 100% identity, to at least a 19, at least a 20, at least a 21, at least a 22, at least a 23, at least a 24, at least a 25, at least a 26, at least a 27, at least a 28, at least a 29, at least a 30, at least a 35, at least a 40, at least a 45, at least a 50, at least a 55, at least a 60, at least a 65, at least a 70, at least a 75, at least a 80, at least a 85, at least a 90, at least a 95, at least a 100, at least a 110, at least a 120, at least a 130, at least a 140, at least a 150, at least a 160, at least a 170, at least a 180, at least a 190, at least a 200, at least a 210, at least a 220, at least a 230, at least a 240, at least a 250, at least a 260, at least a 270, at least a 280, at least a 290, or at least a 300 contiguous nucleotide fragment of SEQ ID NO: 253-378 or SEQ ID NO: 616-701, or the complement thereof; (ii) comprises at least a 19, at least a 20, at least a 21, at least a 22, at least a 23, at least a 24, at least a 25, at least a 26, at least a 27, at least a 28, at least a 29, at least a 30, at least a 35, at least a 40, at least a 45, at least a 50, at least a 55, at least a 60, at least a 65, at least a 70, at least a 75, at least a 80, at least a 85, at least a 90, at least a 95, at least a 100, at least a 110, at least a 120, at least a 130, at least a 140, at least a 150, at least a 160, at least a 170, at least a 180, at least a 190, at least a 200, at least a 210, at least a 220, at least a 230, at least a 240, at least a 250, at least a 260, at least a 270, at least a 280, at least a 290, or at least a 300 contiguous nucleotide fragment of SEQ ID NO: 253-378 or SEQ ID NO: 616-701, or the complement thereof; (iii) comprises at least a 19, at least a 20, at least a 21, at least a 22, at least a 23, at least a 24, at least a 25, at least a 26, at least a 27, at least a 28, at least a 29, at least a 30, at least a 35, at least a 40, at least a 45, at least a 50, at least a 55, at least a 60, at least a a 65, at least a 70, at least a 75, at least a 80, at least a 85, at least a 90, at least a 95, at least a 100, at least a 110, at least a 120, at least a 130, at least a 140, at least a 150, at least a 160, at least a 170, at least a 180, at least a 190, at least a 200, at least a 210, at least a 220, at least a 230, at least a 240, at least a 250, at least a 260, at least a 270, at least a 280, at least a 290, or at least a 300 contiguous nucleotide fragment of a nucleotide sequence encoding an amino acid sequence encoded by SEQ ID NO: 253-378 or SEQ ID NO: 616-701, or the complement thereof, or (iv) can hybridize under stringent conditions to a polynucleotide selected from the group consisting of SEQ ID NO: 253-378 or SEQ ID NO: 616-701, and the complements thereof.

[0199] In some embodiments, the invention encompasses compositions comprising an interfering RNA molecule comprising two or more dsRNAs, wherein the two or more dsRNAs each comprise a different antisense strand. In some embodiments the invention encompasses compositions comprising at least two more interfering RNA molecules, wherein the two or more interfering RNA molecules each comprise a dsRNA comprising a different antisense strand. The two or more interfering RNAs may be present on the same nucleic acid construct, on different nucleic acid constructs or any combination thereof. In other embodiments, the composition comprises a RNA molecule comprising an antisense strand consisting essentially of a nucleotide sequence comprising at least a 19 contiguous nucleotide fragment complementary to at least a 19 contiguous nucleotide fragment comprising the RNA sequence of SEQ ID NO: 253-278 or SEQ ID NO: 616-701, and in some embodiments may further comprise an RNA molecule comprising an antisense strand consisting essentially of a second nucleotide sequence comprising at least a 19 contiguous nucleotide fragment complementary to at least a 19 contiguous nucleotide fragment of SEQ ID NO: 253-378 or SEQ ID NO: 616-701; and in some embodiments may further comprise an RNA molecule comprising an antisense strand consisting essentially of a third nucleotide sequence comprising at least a 19 contiguous nucleotide fragment complementary to at least a 19 contiguous nucleotide fragment of SEQ ID NO: 253-378 or SEQ ID NO: 616-701, and in some embodiments may further comprise an RNA molecule comprising an antisense strand consisting essentially of a fourth nucleotide sequence comprising at least a 19 contiguous nucleotide fragment complementary to at least a 19 contiguous nucleotide fragment of SEQ ID NO: 253-378 or SEQ ID NO: 616-701, and in some embodiments may further comprise an RNA molecule comprising an antisense strand consisting essentially of a fifth nucleotide sequence comprising at least a 19 contiguous nucleotide fragment complementary to at least a 19 contiguous nucleotide fragment of SEQ ID NO: 253-378 or SEQ ID NO: 616-701, and in some embodiments may further comprise an RNA molecule comprising an antisense strand consisting essentially of a sixth nucleotide sequence comprising at least a 19 contiguous nucleotide fragment complementary to at least a 19 contiguous nucleotide fragment of SEQ ID NO: 253-378 or SEQ ID NO: 616-701, and in some embodiments may further comprise an RNA molecule comprising an antisense strand consisting essentially of a seventh nucleotide sequence comprising at least a 19 contiguous nucleotide fragment complementary to at least a 19 contiguous nucleotide fragment of SEQ ID NO: 253-378 or SEQ ID NO: 616-701. In other embodiments, the composition may comprise two or more of the nucleic acid molecules, wherein the two or more nucleic acid molecules each encode a different interfering RNA molecule. In other embodiments, the composition may comprise two or more of the nucleic acid constructs, wherein the two or more nucleic acid constructs each comprise a nucleic acid molecule encoding a different interfering RNA.

[0200] In other embodiments, the composition comprises two or more nucleic acid constructs, two or more nucleic acid molecules, two or more chimeric nucleic acid molecules, two or more artificial plant microRNA precursors of the invention, wherein the two or more nucleic acid constructs, two or more nucleic acid molecules, two or more chimeric nucleic acid molecules, or two or more artificial plant microRNA precursors, each comprise a different antisense strand.

[0201] In some embodiments, the invention encompasses an insecticidal composition for inhibiting the expression of a flea beetle gene described herein, comprising an interfering RNA of the invention and an agriculturally acceptable carrier. In some embodiments, the acceptable agricultural carrier is a transgenic organism expressing an interfering RNA of the invention. In some embodiments the transgenic organism may be a transgenic plant expressing the interfering RNA of the invention that when fed upon by a target Coleopteran plant pest causes the target Coleopteran plant pest to stop feeding, growing or reproducing or causing death of the target Coleopteran plant pest. In other embodiments, the transgenic plant is a transgenic canola plant and the target pest is a flea beetle insect pest. In still other embodiments, the flea beetle insect pest is from the tribe Alticini. In other embodiments, the flea beetle is a species of a genus selected from the group consisting of the genera Altica, Anthobiodes, Aphthona, Aphthonaltica, Aphthonoides, Apteopeda, Argopistes, Argopus, Arrhenocoela, Batophila, Blepharida, Chaetocnema, Clitea, Crepidodera, Derocrepis, Dibolia, Disonycha, Epitrix, Hermipyxis, Hermaeophaga, Hespera, Hippuriphila, Horaia, Hyphasis, Lipromima, Liprus, Longitarsus, Luperomorpha, Lythraria, Manobia, Mantura, Meishania, Minota, Mniophila, Neicrepidodera, Nonarthra, Novofoudrasia, Ochrosis, Oedionychis, Oglobinia, Omeisphaera, Ophrida, Orestia, Paragopus, Pentamesa, Philopona, Phygasia, Phyllotreta, Podagrica, Podagricomela, Podontia, Pseudodera, Psylliodes, Sangariola, Sinaltica, Sphaeroderma, Systena, Trachyaphthona, Xuthea, and Zipangia. In embodiments, the insect is a species selected from the group consisting of Altica ambiens (alder flea beetle), Altica canadensis (prairie flea beetle), Altica chalybaea (grape flea beetle), Altica prasina (poplar flea beetle), Altica rosae (rose flea beetle), Altica sylvia (blueberry flea beetle), Altica ulmi (elm flea beetle), Chaetocnema pulicaria (corn flea beetle), Chaetocnema conofinis (sweet potato flea beetle), Epitrix cucumeris (potato flea beetle), Systena blanda (palestripped flea beetle), and Systena frontalis (redheaded flea beetle). In embodiments, the insect is a species selected from the group consisting of Phyllotreta armoraciae (horseradish flea beetle), Phyllotreta cruciferae (canola flea beetle), Phyllotreta pusilla (western black flea beetle), Phyllotreta nemorum (striped turnip flea beetle), Phyllotreta atra (turnip flea beetle), Phyllotreta robusta (garden flea beetle), Phyllotreta striolata (striped flea beetle), Phyllotreta undulata, Psylliodes chrysocephala, and Psylliodes punctulata (hop flea beetle).

[0202] In other embodiments, the transgenic organism is selected from, but not limited to, the group consisting of: yeast, fungi, algae, bacteria, virus or an arthropod expressing the interfering RNA molecule of the invention. In some embodiments, the transgenic organism is a virus, for example an insect baculovirus that expresses an interfering RNA molecule of the invention upon infection of an insect host. Such a baculovirus is likely more virulent against the target insect than the wildtype untransformed baculovirus. In other embodiments the transgenic organism is a transgenic bacterium that is applied to an environment where a target pest occurs or is known to have occurred. In some embodiments, non-pathogenic symbiotic bacteria, which are able to live and replicate within plant tissues, so-called endophytes, or non-pathogenic symbiotic bacteria, which are capable of colonizing the phyllosphere or the rhizosphere, so-called epiphytes, are used. Such bacteria include bacteria of the genera Agrobacterium, Alcaligenes, Azospirillum, Azotobacter, Bacillus, Clavibacter, Enterobacter, Erwinia, Flavobacter, Klebsiella, Pseudomonas, Rhizobium, Serratia, Streptomyces and Xanthomonas. Symbiotic fungi, such as Trichoderma and Gliocladium are also possible hosts for expression of the inventive interfering RNA molecule for the same purpose.

[0203] In some embodiments, an acceptable agricultural carrier is a formulation useful for applying the composition comprising the interfering RNA molecule to a plant or seed. In some embodiments, the interfering RNA molecules are stabilized against degradation because of their double stranded nature and the introduction of Dnase/Rnase inhibitors. For example, dsRNA or siRNA can be stabilized by including thymidine or uridine nucleotide 3′ overhangs. The dsRNA or siRNA contained in the compositions of the invention can be chemically synthesized at industrial scale in large amounts. Methods available would be through chemical synthesis or through the use of a biological agent.

[0204] In some embodiments, the invention encompasses transgenic plants, or parts thereof, comprising an interfering RNA molecule, a nucleic acid construct, a chimeric nucleic acid molecule, a artificial plant microRNA precursor molecule and/or a composition of the invention, wherein the transgenic plant has enhanced resistance to a Coleopteran insect or flea beetle as compared to a control plant. In other embodiments, the transgenic plant, or part thereof, is a transgenic canola plant, or part thereof. The invention further encompasses transgenic seed of the transgenic plants of the invention, wherein the transgenic seed comprises an interfering RNA molecule, a nucleic acid construct, a chimeric nucleic acid molecule, an artificial plant microRNA precursor molecule and/or a composition of the invention. In some embodiments the transgenic seed is a transgenic canola seed.

[0205] Transgenic plants expressing an interfering RNA of the invention are tolerant or resistant to attack by target insect pests. When the insect starts feeding on such a transgenic plant, it also ingests the expressed dsRNA or siRNA. This may deter the insect from further biting into the plant tissue or may even harm or kill the insect. A nucleic acid sequence encoding a dsRNA or siRNA of the invention is inserted into an expression cassette, which is then preferably stably integrated in the genome of the plant. The nucleic acid sequences of the expression cassette introduced into the genome of the plant are heterologous to the plant and non-naturally occurring. Plants transformed in accordance with the present invention may be monocots or dicots and include, but are not limited to, corn, wheat, barley, rye, sweet potato, bean, pea, chicory, lettuce, cabbage, cauliflower, broccoli, turnip, radish, spinach, asparagus, onion, garlic, pepper, celery, squash, pumpkin, hemp, zucchini, apple, pear, quince, melon, plum, cherry, peach, nectarine, apricot, strawberry, grape, raspberry, blackberry, pineapple, avocado, papaya, mango, banana, soybean, tomato, sorghum, sugarcane, sugar beet, sunflower, rapeseed (also referred to as canola), clover, tobacco, carrot, cotton, alfalfa, rice, potato, eggplant, cucumber, Arabidopsis, and woody plants such as coniferous and deciduous trees. In further embodiments, the transgenic plant is a transgenic canola plant.

[0206] Expression of the interfering RNA molecule in transgenic plants is driven by regulatory sequences comprising promoters that function in plants. The choice of promoter will vary depending on the temporal and spatial requirements for expression, and also depending on the insect target species. Thus, expression of the interfering RNAs of this invention in leaves, in stems, in inflorescences (e.g. anther, filament, pollen, style, petal, sepal, pedicel, stamen, etc.), in roots, and/or seedlings is contemplated. In many cases, however, protection against more than one type of insect pest is sought, and thus expression in multiple tissues is desirable. Although many promoters from dicotyledons have been shown to be operational in monocotyledons and vice versa, ideally dicotyledonous promoters are selected for expression in dicotyledons, and monocotyledonous promoters for expression in monocotyledons. However, there is no restriction to the provenance of selected promoters; it is sufficient that they are operational in driving the expression of the dsRNA or siRNA in the desired cell.

[0207] Promoters useful with the invention include, but are not limited to, those that drive expression of a nucleotide sequence constitutively, those that drive expression when induced, and those that drive expression in a tissue- or developmentally-specific manner. These various types of promoters are known in the art.

[0208] In some embodiments, tissue-specific/tissue-preferred promoters can be used. Tissue-specific or tissue-preferred expression patterns include, but are not limited to, green tissue specific or preferred, root specific or preferred, stem specific or preferred, and flower specific or preferred. In addition, promoters functional in plastids can be used. In some embodiments of the invention, inducible promoters can be used. In further aspects, the nucleotide sequences of the invention can be operably associated with a promoter that is wound inducible or inducible by pest or pathogen infection (e.g., a insect or nematode plant pest)

[0209] In some embodiments of the present invention, a “minimal promoter” or “basal promoter” is used. A minimal promoter is capable of recruiting and binding RNA polymerase II complex and its accessory proteins to permit transcriptional initiation and elongation. In some embodiments, a minimal promoter is constructed to comprise only the nucleotides/nucleotide sequences from a selected promoter that are required for binding of the transcription factors and transcription of a nucleotide sequence of interest that is operably associated with the minimal promoter including but not limited to TATA box sequences. In other embodiments, the minimal promoter lacks cis sequences that recruit and bind transcription factors that modulate (e.g., enhance, repress, confer tissue specificity, confer inducibility or repressibility) transcription. A minimal promoter is generally placed upstream (i.e., 5′) of a nucleotide sequence to be expressed. Thus, nucleotides/nucleotide sequences from any promoter useable with the present invention can be selected for use as a minimal promoter.

[0210] In some embodiments, a recombinant nucleic acid molecule of the invention can be an “expression cassette.” As used herein, “expression cassette” means a recombinant nucleic acid molecule comprising a nucleotide sequence of interest (e.g., the nucleotide sequences of the invention), wherein the nucleotide sequence is operably associated with at least a control sequence (e.g., a promoter). Thus, some embodiments of the invention provide expression cassettes designed to express nucleotides sequences encoding the dsRNAs or siRNAs of the invention. In this manner, for example, one or more plant promoters operably associated with one or more nucleotide sequences of the invention are provided in expression cassettes for expression in a canola plant, plant part and/or plant cell.

[0211] An expression cassette comprising a nucleotide sequence of interest may be chimeric, meaning that at least one of its components is heterologous with respect to at least one of its other components. An expression cassette may also be one that comprises a native promoter driving its native gene, however it has been obtained in a recombinant form useful for heterologous expression. Such usage of an expression cassette makes it so it is not naturally occurring in the cell into which it has been introduced.

[0212] An expression cassette also can optionally include a transcriptional and/or translational termination region (i.e., termination region) that is functional in plants. A variety of transcriptional terminators are available for use in expression cassettes and are responsible for the termination of transcription beyond the heterologous nucleotide sequence of interest and correct mRNA polyadenylation. The termination region may be native to the transcriptional initiation region, may be native to the operably linked nucleotide sequence of interest, may be native to the plant host, or may be derived from another source (i.e., foreign or heterologous to the promoter, the nucleotide sequence of interest, the plant host, or any combination thereof). Appropriate transcriptional terminators include, but are not limited to, the CAMV 35S terminator, the tml terminator, the nopaline synthase terminator and/or the pea rbcs E9 terminator. These can be used in both monocotyledons and dicotyledons. In addition, a coding sequence's native transcription terminator can be used.

[0213] An expression cassette of the invention also can include a nucleotide sequence for a selectable marker, which can be used to select a transformed plant, plant part and/or plant cell. As used herein, “selectable marker” means a nucleotide sequence that when expressed imparts a distinct phenotype to the plant, plant part and/or plant cell expressing the marker and thus allows such transformed plants, plant parts and/or plant cells to be distinguished from those that do not have the marker. Such a nucleotide sequence may encode either a selectable or screenable marker, depending on whether the marker confers a trait that can be selected for by chemical means, such as by using a selective agent (e.g., an antibiotic, herbicide, or the like), or on whether the marker is simply a trait that one can identify through observation or testing, such as by screening (e.g., the R-locus trait). Of course, many examples of suitable selectable markers are known in the art and can be used in the expression cassettes described herein.

[0214] Examples of selectable markers include, but are not limited to, a nucleotide sequence encoding neo or nptII, which confers resistance to kanamycin, G418, and the like (Potrykus et al. (1985) Mol. Gen. Genet. 199:183-188); a nucleotide sequence encoding bar, which confers resistance to phosphinothricin; a nucleotide sequence encoding an altered 5-enolpyruvylshikimate-3-phosphate (EPSP) synthase, which confers resistance to glyphosate (Hinchee et al. (1988) Biotech. 6:915-922); a nucleotide sequence encoding a nitrilase such as bxn from Klebsiella ozaenae that confers resistance to bromoxynil (Stalker et al. (1988) Science 242:419-423); a nucleotide sequence encoding an altered acetolactate synthase (ALS) that confers resistance to imidazolinone, sulfonylurea or other ALS-inhibiting chemicals (EP Patent Application No. 154204); a nucleotide sequence encoding a methotrexate-resistant dihydrofolate reductase (DHFR) (Thillet et al. (1988) J. Biol. Chem. 263:12500-12508); a nucleotide sequence encoding a dalapon dehalogenase that confers resistance to dalapon; a nucleotide sequence encoding a mannose-6-phosphate isomerase (also referred to as phosphomannose isomerase (PMI)) that confers an ability to metabolize mannose (U.S. Pat. Nos. 5,767,378 and 5,994,629); a nucleotide sequence encoding an altered anthranilate synthase that confers resistance to 5-methyl tryptophan; and/or a nucleotide sequence encoding hph that confers resistance to hygromycin. One of skill in the art is capable of choosing a suitable selectable marker for use in an expression cassette of the invention.

[0215] An expression cassette of the invention also can include polynucleotides that encode other desired traits. Such desired traits can be other polynucleotides which confer insect resistance, or which confer nematode resistance, or other agriculturally desirable traits. Such polynucleotides can be stacked with any combination of nucleotide sequences to create plants, plant parts or plant cells having the desired phenotype. Stacked combinations can be created by any method including, but not limited to, cross breeding plants by any conventional methodology, or by genetic transformation. If stacked by genetically transforming the plants, nucleotide sequences encoding additional desired traits can be combined at any time and in any order. For example, a single transgene can comprise multiple expression cassettes, such that multiple expression cassettes are introduced into the genome of a transformed cell at a single genomic location. Alternatively, a transgenic plant comprising one or more desired traits can be used as the target to introduce further traits by subsequent transformation. The additional nucleotide sequences can be introduced simultaneously in a co-transformation protocol with a nucleotide sequence, nucleic acid molecule, nucleic acid construct, and/or other composition of the invention, provided by any combination of expression cassettes. For example, if two nucleotide sequences will be introduced, they can be incorporated in separate cassettes (trans) or can be incorporated on the same cassette (cis). Expression of the nucleotide sequences can be driven by the same promoter or by different promoters. It is further recognized that nucleotide sequences can be stacked at a desired genomic location using a site-specific recombination system. See, e.g., Intl Patent Application Publication Nos. WO 99/25821; WO 99/25854; WO 99/25840; WO 99/25855 and WO 99/25853.

[0216] Thus, an expression cassette can include a coding sequence for one or more polypeptides for agronomic traits that primarily are of benefit to a seed company, grower or grain processor. A polypeptide of interest can be any polypeptide encoded by a polynucleotide sequence of interest. Non-limiting examples of polypeptides of interest that are suitable for production in plants include those resulting in agronomically important traits such as herbicide resistance (also sometimes referred to as “herbicide tolerance”), virus resistance, bacterial pathogen resistance, insect resistance, nematode resistance, and/or fungal resistance. See, e.g., U.S. Pat. Nos. 5,569,823; 5,304,730; 5,495,071; 6,329,504; and 6,337,431.

[0217] Vectors suitable for plant transformation are described elsewhere in this specification. For Agrobacterium-mediated transformation, binary vectors or vectors carrying at least one T-DNA border sequence are suitable, whereas for direct gene transfer any vector is suitable and linear DNA containing only the construct of interest may be preferred. In the case of direct gene transfer, transformation with a single DNA species or co-transformation can be used (Schocher et al. Biotechnology 4:1093-1096 (1986)). For both direct gene transfer and Agrobacterium-mediated transfer, transformation is usually (but not necessarily) undertaken with a selectable marker that may provide resistance to an antibiotic (kanamycin, hygromycin or methotrexate) or a herbicide (basta). Plant transformation vectors of the invention may also comprise other selectable marker genes, for example, phosphomannose isomerase (pmi), which provides for positive selection of the transgenic plants as disclosed in U.S. Pat. Nos. 5,767,378 and 5,994,629, herein incorporated by reference, or phosphinotricin acetyltransferase (pat), which provides tolerance to the herbicide phosphinotricin (glufosinate). The choice of selectable marker is not, however, critical to the invention.

[0218] In other embodiments, a nucleic acid sequence of the invention is directly transformed into the plastid genome. Plastid transformation technology is extensively described in U.S. Pat. Nos. 5,451,513, 5,545,817, and 5,545,818, in PCT application no. WO 95/16783, and in McBride et al. (1994) Proc. Nati. Acad. Sci. USA 91, 7301-7305. The basic technique for chloroplast transformation involves introducing regions of cloned plastid DNA flanking a selectable marker together with the gene of interest into a suitable target tissue, e.g., using biolistics or protoplast transformation (e.g., calcium chloride or PEG mediated transformation). The 1 to 1.5 kb flanking regions, termed targeting sequences, facilitate homologous recombination with the plastid genome and thus allow the replacement or modification of specific regions of the plastome. Initially, point mutations in the chloroplast 16S rRNA and rps12 genes conferring resistance to spectinomycin and/or streptomycin are utilized as selectable markers for transformation (Svab, Z., Hajdukiewicz, P., and Maliga, P. (1990) Proc. Nati. Acad. Sci. USA 87, 8526-8530; Staub, J. M., and Maliga, P. (1992) Plant Cell 4, 39-45). This resulted in stable homoplasmic transformants at a frequency of approximately one per 100 bombardments of target leaves. The presence of cloning sites between these markers allowed creation of a plastid targeting vector for introduction of foreign genes (Staub, J. M., and Maliga, P. (1993) EMBO J. 12, 601-606). Substantial increases in transformation frequency are obtained by replacement of the recessive rRNA or r-protein antibiotic resistance genes with a dominant selectable marker, the bacterial aadA gene encoding the spectinomycin-cletoxifying enzyme aminoglycoside-3′-adenyltransf erase (Svab, Z., and Maliga, P. (1993) Proc. Natl. Acad. Sci. USA 90, 913-917). Previously, this marker had been used successfully for high-frequency transformation of the plastid genome of the green alga Chlamydomonas reinhardtii (Goldschmidt-Clermont, M. (1991) Nucl. Acids Res. 19:4083-4089). Other selectable markers useful for plastid transformation are known in the art and encompassed within the scope of the invention. Typically, approximately 15-20 cell division cycles following transformation are required to reach a homoplastidic state. Plastid expression, in which genes are inserted by homologous recombination into all of the several thousand copies of the circular plastid genome present in each plant cell, takes advantage of the enormous copy number advantage over nuclear-expressed genes to permit expression levels that can readily exceed 10% of the total soluble plant protein. In a preferred embodiment, a nucleic acid sequence of the present invention is inserted into a plastid-targeting vector and transformed into the plastid genome of a desired plant host. Plants homoplastic for plastid genomes containing a nucleic acid sequence of the present invention are obtained, and are preferentially capable of high expression of the nucleic acid sequence.

[0219] The compositions of the invention can also be combined with other biological control agents to enhance control of a Coleopteran insect or a flea beetle populations. Thus, the invention provides a method of enhancing control of a Coleopteran insect population or a flea beetle population by providing a transgenic plant that produces an interfering RNA of the invention and further comprises a polynucleotide that encodes a second insecticidal agent. The second insecticidal agent may be an insecticidal protein derived from Bacillus thuringiensis. A B. thuringiensis insecticidal protein can be any of a number of insecticidal proteins including but not limited to a Cry1 protein, a Cry3 protein, a Cry7 protein, a Cry8 protein, a Cry11 protein, a Cry22 protein, a Cry 23 protein, a Cry 36 protein, a Cry37 protein, a Cry34 protein together with a Cry35 protein, a binary insecticidal protein CryET33 and CryET34, a binary insecticidal protein TIC100 and TIC101, a binary insecticidal protein PS14961, a VIP, a TIC900 or related protein, a TIC901, TIC1201, TIC407, TIC417, a modified Cry3A protein, or hybrid proteins or chimeras made from any of the preceding insecticidal proteins. The insecticidal protein may be any other insecticidal protein derived from B. thuringiensis known in the art to be insecticidal (see for example, Palma et al., 2014, Toxins 6: 3296-3325, and references within; Berry and Crickmore, 2017, J of Invertebrate Pathology 142: 16-22, and reference within).

[0220] In other embodiments, the transgenic plant may produce an interfering RNA of the invention and a second insecticidal agent which is derived from sources other than B. thuringiensis. The second insecticidal agent can be an agent selected from the group comprising a patatin, a protease, a protease inhibitor, a chitinase, a urease, an alpha-amylase inhibitor, a pore-forming protein, a lectin, an engineered antibody or antibody fragment, a Bacillus cereus insecticidal protein, a Xenorhabdus spp. (such as X. nematophila or X. bovienii) insecticidal protein, a Photorhabdus spp. (such as P. luminescens or P. asymobiotica) insecticidal protein, a Brevibacillus laterosporous insecticidal protein, a Lysinibacillus sphearicus insecticidal protein, a Chromobacterium spp. insecticidal protein, a Yersinia entomophaga insecticidal protein, a Paenibacillus popiliae insecticidal protein, a Clostridium spp. (such as C. bifermentans) insecticidal protein, and a lignin. In other embodiments, the second agent may be at least one insecticidal protein derived from an insecticidal toxin complex (Tc) from Photorhabdus, Xenorhabus, Serratia, or Yersinia. In other embodiments, the insecticidal protein may be an ADP-ribosyltransferase derived from an insecticidal bacteria, such as Photorhabdus spp. In other embodiments, the insecticidal protein may be a VIP protein, such as VIP1 or VIP2 from B. cereus. In still other embodiments, the insecticidal protein may be a binary toxin derived from an insecticidal bacteria, such as ISP1A and ISP2A from B. laterosporous or BinA and BinB from L. sphaericus. In still other embodiments, the insecticidal protein may be engineered or may be a hybrid or chimera of any of the preceding insecticidal proteins.

[0221] In another embodiment, the transgenic plant and transgenic seed is a canola plant or canola seed. In another embodiment, the transgenic canola plant is provided by crossing a first transgenic canola plant comprising a dsRNA of the invention with a transgenic canola plant comprising a transgenic event, for example RoundupReady® Canola, Navigator™ Canola, Phytaseed™ Canola, or LibertyLink® Canola.

[0222] Even where the insecticide or insecticidal seed coating is active against a different insect, the insecticide or insecticidal seed coating is useful to expand the range of insect control, for example by adding an insecticide or insecticidal seed coating that has activity against lepidopteran insects to the transgenic plant or seed of the invention, which has activity against Coleopteran insects, the treated plant or coated transgenic seed controls both lepidopteran and Coleopteran insect pests.

[0223] In further embodiments, the invention encompasses a biological sample from a transgenic plant, seed, or parts thereof, of the invention, wherein the sample comprises a nucleic acid that is or encodes at least one strand of a dsRNA of the invention. In other embodiments, the invention encompasses a commodity product derived from a transgenic plant, seed, or parts thereof, of the invention. In some embodiments, the commodity product is selected from the group consisting of whole or processed seeds, beans, grains, kernels, hulls, meals, grits, flours, sugars, sugars, starches, protein concentrates, protein isolates, waxes, oils, extracts, juices, concentrates, liquids, syrups, feed, silage, fiber, paper or other food or product produced from plants. In some embodiments, the commodity product consists of whole seeds and comprises a nucleic acid that is or encodes at least one strand of a dsRNA of the invention. In some embodiments, the biological sample or commodity product is toxic to insects. In some embodiments, the transgenic plant is a transgenic canola plant.

[0224] The invention further encompasses a method of controlling a Coleopteran insect or a flea beetle comprising contacting the insect with a nucleic acid molecule that is or is capable of producing an interfering RNA molecule of the invention for inhibiting expression of a target gene in the insect thereby controlling the Coleopteran insect or the flea beetle. In some embodiments, the target gene comprises a coding sequence (i) having at least 80% identity, at least 85% identity, at least 86% identity, at least 87% identity, at least 88% identity, at least 89% identity, at least 90% identity, at least 91% identity, at least 92% identity, at least 93% identity, at least 94% identity, at least 95% identity, at least 96% identity, at least 97% identity, at least 98% identity, at least 99% identity, or 100% identity, to at least a 19, at least a 20, at least a 21, at least a 22, at least a 23, at least a 24, at least a 25, at least a 26, at least a 27, at least a 28, at least a 29, at least a 30, at least a 35, at least a 40, at least a 45, at least a 50, at least a 55, at least a 60, at least a 65, at least a 70, at least a 75, at least a 80, at least a 85, at least a 90, at least a 95, at least a 100, at least a 110, at least a 120, at least a 130, at least a 140, at least a 150, at least a 160, at least a 170, at least a 180, at least a 190, at least a 200, at least a 210, at least a 220, at least a 230, at least a 240, at least a 250, at least a 260, at least a 270, at least a 280, at least a 290, or at least a 300 contiguous nucleotide fragment of SEQ ID NO: 1-63 or SEQ ID NO: 442-483, or a complement thereof; (ii) comprising at least a 19, at least a 20, at least a 21, at least a 22, at least a 23, at least a 24, at least a 25, at least a 26, at least a 27, at least a 28, at least a 29, at least a 30, at least a 35, at least a 40, at least a 45, at least a 50, at least a 55, at least a 60, at least a 65, at least a 70, at least a 75, at least a 80, at least a 85, at least a 90, at least a 95, at least a 100, at least a 110, at least a 120, at least a 130, at least a 140, at least a 150, at least a 160, at least a 170, at least a 180, at least a 190, at least a 200, at least a 210, at least a 220, at least a 230, at least a 240, at least a 250, at least a 260, at least a 270, at least a 280, at least a 290, or at least a 300 contiguous nucleotide fragment of SEQ ID NO: 1-63 or SEQ ID NO: 442-483, or a complement thereof; (iii) comprising at least a 19, at least a 20, at least a 21, at least a 22, at least a 23, at least a 24, at least a 25, at least a 26, at least a 27, at least a 28, at least a 29, at least a 30, at least a 35, at least a 40, at least a 45, at least a 50, at least a 55, at least a 60, at least a 65, at least a 70, at least a 75, at least a 80, at least a 85, at least a 90, at least a 95, at least a 100, at least a 110, at least a 120, at least a 130, at least a 140, at least a 150, at least a 160, at least a 170, at least a 180, at least a 190, at least a 200, at least a 210, at least a 220, at least a 230, at least a 240, at least a 250, at least a 260, at least a 270, at least a 280, at least a 290, or at least a 300 contiguous nucleotide fragment of a nucleotide sequence encoding an amino acid sequence encoded by SEQ ID NO: 1-63 or SEQ ID NO: 442-483, or a complement thereof. In some embodiments the target gene coding sequence comprises SEQ ID NO: 1-63 or SEQ ID NO: 442-483, or a complement thereof, or can hybridize under stringent conditions to a polynucleotide selected from the group consisting of SEQ ID NO: 1-63 or SEQ ID NO: 442-483, and the complements thereof. In other embodiments, the interfering RNA molecule of the invention is complementary to a portion of a mRNA polynucleotide transcribable from the flea beetle target genes described herein.

[0225] In some embodiments of the method of controlling a Coleopteran insect pest or a flea beetle pest, the interfering RNA molecule of the invention comprises at least one dsRNA, wherein the dsRNA is a region of double-stranded RNA comprising annealed complementary strands, one strand of which comprises a sequence of at least 19 contiguous nucleotides which (i) has at least 80% identity, at least 85% identity, at least 86% identity, at least 87% identity, at least 88% identity, at least 89% identity, at least 90% identity, at least 91% identity, at least 92% identity, at least 93% identity, at least 94% identity, at least 95% identity, at least 96% identity, at least 97% identity, at least 98% identity, at least 99% identity, or 100% identity, to at least a 19, at least a 20, at least a 21, at least a 22, at least a 23, at least a 24, at least a 25, at least a 26, at least a 27, at least a 28, at least a 29, at least a 30, at least a 35, at least a 40, at least a 45, at least a 50, at least a 55, at least a 60, at least a 65, at least a 70, at least a 75, at least a 80, at least a 85, at least a 90, at least a 95, at least a 100, at least a 110, at least a 120, at least a 130, at least a 140, at least a 150, at least a 160, at least a 170, at least a 180, at least a 190, at least a 200, at least a 210, at least a 220, at least a 230, at least a 240, at least a 250, at least a 260, at least a 270, at least a 280, at least a 290, or at least a 300 contiguous nucleotide fragment of SEQ ID NO: 253-378 or SEQ ID NO: 616-701, or the complement thereof; or (ii) comprises at least a 19, at least a 20, at least a 21, at least a 22, at least a 23, at least a 24, at least a 25, at least a 26, at least a 27, at least a 28, at least a 29, at least a 30, at least a 35, at least a 40, at least a 45, at least a 50, at least a 55, at least a 60, at least a 65, at least a 70, at least a 75, at least a 80, at least a 85, at least a 90, at least a 95, at least a 100, at least a 110, at least a 120, at least a 130, at least a 140, at least a 150, at least a 160, at least a 170, at least a 180, at least a 190, at least a 200, at least a 210, at least a 220, at least a 230, at least a 240, at least a 250, at least a 260, at least a 270, at least a 280, at least a 290, or at least a 300 contiguous nucleotide fragment of SEQ ID NO: 253-378 or SEQ ID NO: 616-701, or the complement thereof; (iii) comprises at least a 19, at least a 20, at least a 21, at least a 22, at least a 23, at least a 24, at least a 25, at least a 26, at least a 27, at least a 28, at least a 29, at least a 30, at least a 35, at least a 40, at least a 45, at least a 50, at least a 55, at least a 60, at least a a 65, at least a 70, at least a 75, at least a 80, at least a 85, at least a 90, at least a 95, at least a 100, at least a 110, at least a 120, at least a 130, at least a 140, at least a 150, at least a 160, at least a 170, at least a 180, at least a 190, at least a 200, at least a 210, at least a 220, at least a 230, at least a 240, at least a 250, at least a 260, at least a 270, at least a 280, at least a 290, or at least a 300 contiguous nucleotide fragment of a nucleotide sequence encoding an amino acid sequence encoded by SEQ ID NO: 253-378 or SEQ ID NO: 616-701, or the complement thereof, or (iv) can hybridize under stringent conditions to a polynucleotide selected from the group consisting of SEQ ID NO: 253-378 or SEQ ID NO: 616-701, and the complements thereof.

[0226] In some embodiments of the method of controlling a Coleopteran insect pest or a flea beetle pest, the interfering RNA molecule comprises, consists essentially of or consists of from 18, 19, 20 or 21 consecutive nucleotides to at least about 300 consecutive nucleotides of SEQ ID NO: 253-378 or SEQ ID NO: 616-701. In other embodiments of the methods of the invention, the interfering RNA molecule of the invention comprises a dsRNA which comprises, consists essentially of or consists of any 21-mer subsequence of SEQ ID NO: 253-315 or SEQ ID NO: 616-657 consisting of N to N+20 nucleotides, or any complement thereof. For example, an interfering RNA molecule of the invention comprises a dsRNA which comprises, consist essentially of or consists of any 21-mer subsequence of SEQ ID NO: 253, wherein N is nucleotide 1 to nucleotide 2299 of SEQ ID NO: 253, or any complement thereof. In other words, the portion of the mRNA that is targeted comprises any of the 2299 21 consecutive nucleotide subsequences i.e. 21-mers) of SEQ ID NO: 253, or any of their complementing sequences. It will be recognized that these 2299 21 consecutive nucleotide subsequences include all possible 21 consecutive nucleotide subsequences from SEQ ID NO: 253 and from SEQ ID NO: 316, and their complements, as SEQ ID NO's 253 and 316 are all to the same target, namely Pc1, which also may be referred to as a P. chrysocephala ortholog of Sec23. It will similarly be recognized that all 21-mer subsequences of SEQ ID NO: 253-315 or SEQ ID NO: 616-657, and all complement subsequences thereof, include all possible 21 consecutive nucleotide subsequences of SEQ ID NO: 316-378 or SEQ ID NO: 658-701, and the complement subsequences thereof.

[0227] Similarly, in some embodiments of the method of controlling a Coleopteran insect pest or a flea beetle pest, an interfering RNA molecule of the invention comprises a dsRNA which comprises, consist essentially of or consists of any 21-mer subsequence of SEQ ID NO: 254, wherein N is nucleotide 1 to nucleotide 2701 of SEQ ID NO: 254, or any complement thereof. Another interfering RNA molecule of the invention comprises a dsRNA which comprises, consist essentially of or consists of any 21-mer subsequence of SEQ ID NO: 255, wherein N is nucleotide 1 to nucleotide 2848 of SEQ ID NO: 255, or any complement thereof. Another interfering RNA molecule of the invention comprises a dsRNA which comprises, consist essentially of or consists of any 21-mer subsequence of SEQ ID NO: 256, wherein N is nucleotide 1 to nucleotide 595 of SEQ ID NO: 256, or any complement thereof. Another interfering RNA molecule of the invention comprises a dsRNA which comprises, consist essentially of or consists of any 21-mer subsequence of SEQ ID NO: 257, wherein N is nucleotide 1 to nucleotide 583 of SEQ ID NO: 257, or any complement thereof. Another interfering RNA molecule of the invention comprises a dsRNA which comprises, consist essentially of or consists of any 21-mer subsequence of SEQ ID NO: 258, wherein N is nucleotide 1 to nucleotide 536 of SEQ ID NO: 258, or any complement thereof. Another interfering RNA molecule of the invention comprises a dsRNA which comprises, consist essentially of or consists of any 21-mer subsequence of SEQ ID NO: 259, wherein N is nucleotide 1 to nucleotide 748 of SEQ ID NO: 259, or any complement thereof. Another interfering RNA molecule of the invention comprises a dsRNA which comprises, consist essentially of or consists of any 21-mer subsequence of SEQ ID NO: 260, wherein N is nucleotide 1 to nucleotide 658 of SEQ ID NO: 260, or any complement thereof. Another interfering RNA molecule of the invention comprises a dsRNA which comprises, consist essentially of or consists of any 21-mer subsequence of SEQ ID NO: 261, wherein N is nucleotide 1 to nucleotide 727 of SEQ ID NO: 261, or any complement thereof. Another interfering RNA molecule of the invention comprises a dsRNA which comprises, consist essentially of or consists of any 21-mer subsequence of SEQ ID NO: 262, wherein N is nucleotide 1 to nucleotide 2818 of SEQ ID NO: 262, or any complement thereof. Another interfering RNA molecule of the invention comprises a dsRNA which comprises, consist essentially of or consists of any 21-mer subsequence of SEQ ID NO: 263, wherein N is nucleotide 1 to nucleotide 367 of SEQ ID NO: 263, or any complement thereof. Another interfering RNA molecule of the invention comprises a dsRNA which comprises, consist essentially of or consists of any 21-mer subsequence of SEQ ID NO: 264, wherein N is nucleotide 1 to nucleotide 2620 of SEQ ID NO: 264, or any complement thereof. Another interfering RNA molecule of the invention comprises a dsRNA which comprises, consist essentially of or consists of any 21-mer subsequence of SEQ ID NO: 265, wherein N is nucleotide 1 to nucleotide 1264 of SEQ ID NO: 265, or any complement thereof. Another interfering RNA molecule of the invention comprises a dsRNA which comprises, consist essentially of or consists of any 21-mer subsequence of SEQ ID NO: 266, wherein N is nucleotide 1 to nucleotide 646 of SEQ ID NO: 266, or any complement thereof. Another interfering RNA molecule of the invention comprises a dsRNA which comprises, consist essentially of or consists of any 21-mer subsequence of SEQ ID NO: 267, wherein N is nucleotide 1 to nucleotide 589 of SEQ ID NO: 267, or any complement thereof. Another interfering RNA molecule of the invention comprises a dsRNA which comprises, consist essentially of or consists of any 21-mer subsequence of SEQ ID NO: 268, wherein N is nucleotide 1 to nucleotide 631 of SEQ ID NO: 268, or any complement thereof. Another interfering RNA molecule of the invention comprises a dsRNA which comprises, consist essentially of or consists of any 21-mer subsequence of SEQ ID NO: 269, wherein N is nucleotide 1 to nucleotide 529 of SEQ ID NO: 269, or any complement thereof. Another interfering RNA molecule of the invention comprises a dsRNA which comprises, consist essentially of or consists of any 21-mer subsequence of SEQ ID NO: 270, wherein N is nucleotide 1 to nucleotide 480 of SEQ ID NO: 270, or any complement thereof. Another interfering RNA molecule of the invention comprises a dsRNA which comprises, consist essentially of or consists of any 21-mer subsequence of SEQ ID NO: 271, wherein N is nucleotide 1 to nucleotide 3325 of SEQ ID NO: 271, or any complement thereof. Another interfering RNA molecule of the invention comprises a dsRNA which comprises, consist essentially of or consists of any 21-mer subsequence of SEQ ID NO: 272, wherein N is nucleotide 1 to nucleotide 535 of SEQ ID NO: 272, or any complement thereof. Another interfering RNA molecule of the invention comprises a dsRNA which comprises, consist essentially of or consists of any 21-mer subsequence of SEQ ID NO: 273, wherein N is nucleotide 1 to nucleotide 295 of SEQ ID NO: 273, or any complement thereof. Another interfering RNA molecule of the invention comprises a dsRNA which comprises, consist essentially of or consists of any 21-mer subsequence of SEQ ID NO: 274, wherein N is nucleotide 1 to nucleotide 1294 of SEQ ID NO: 274, or any complement thereof. Another interfering RNA molecule of the invention comprises a dsRNA which comprises, consist essentially of or consists of any 21-mer subsequence of SEQ ID NO: 275, wherein N is nucleotide 1 to nucleotide 895 of SEQ ID NO: 275, or any complement thereof. Another interfering RNA molecule of the invention comprises a dsRNA which comprises, consist essentially of or consists of any 21-mer subsequence of SEQ ID NO: 276, wherein N is nucleotide 1 to nucleotide 2851 of SEQ ID NO: 276, or any complement thereof. Another interfering RNA molecule of the invention comprises a dsRNA which comprises, consist essentially of or consists of any 21-mer subsequence of SEQ ID NO: 277, wherein N is nucleotide 1 to nucleotide 562 of SEQ ID NO: 277, or any complement thereof. Another interfering RNA molecule of the invention comprises a dsRNA which comprises, consist essentially of or consists of any 21-mer subsequence of SEQ ID NO: 278, wherein N is nucleotide 1 to nucleotide 583 of SEQ ID NO: 278, or any complement thereof. Another interfering RNA molecule of the invention comprises a dsRNA which comprises, consist essentially of or consists of any 21-mer subsequence of SEQ ID NO: 279, wherein N is nucleotide 1 to nucleotide 577 of SEQ ID NO: 279, or any complement thereof. Another interfering RNA molecule of the invention comprises a dsRNA which comprises, consist essentially of or consists of any 21-mer subsequence of SEQ ID NO: 280, wherein N is nucleotide 1 to nucleotide 775 of SEQ ID NO: 280, or any complement thereof. Another interfering RNA molecule of the invention comprises a dsRNA which comprises, consist essentially of or consists of any 21-mer subsequence of SEQ ID NO: 281, wherein N is nucleotide 1 to nucleotide 484 of SEQ ID NO: 281, or any complement thereof. Another interfering RNA molecule of the invention comprises a dsRNA which comprises, consist essentially of or consists of any 21-mer subsequence of SEQ ID NO: 282, wherein N is nucleotide 1 to nucleotide 727 of SEQ ID NO: 282, or any complement thereof. Another interfering RNA molecule of the invention comprises a dsRNA which comprises, consist essentially of or consists of any 21-mer subsequence of SEQ ID NO: 283, wherein N is nucleotide 1 to nucleotide 2998 of SEQ ID NO: 283, or any complement thereof. Another interfering RNA molecule of the invention comprises a dsRNA which comprises, consist essentially of or consists of any 21-mer subsequence of SEQ ID NO: 284, wherein N is nucleotide 1 to nucleotide 367 of SEQ ID NO: 284, or any complement thereof. Another interfering RNA molecule of the invention comprises a dsRNA which comprises, consist essentially of or consists of any 21-mer subsequence of SEQ ID NO: 285, wherein N is nucleotide 1 to nucleotide 1801 of SEQ ID NO: 285, or any complement thereof. Another interfering RNA molecule of the invention comprises a dsRNA which comprises, consist essentially of or consists of any 21-mer subsequence of SEQ ID NO: 286, wherein N is nucleotide 1 to nucleotide 484 of SEQ ID NO: 286, or any complement thereof. Another interfering RNA molecule of the invention comprises a dsRNA which comprises, consist essentially of or consists of any 21-mer subsequence of SEQ ID NO: 287, wherein N is nucleotide 1 to nucleotide 622 of SEQ ID NO: 287, or any complement thereof. Another interfering RNA molecule of the invention comprises a dsRNA which comprises, consist essentially of or consists of any 21-mer subsequence of SEQ ID NO: 288, wherein N is nucleotide 1 to nucleotide 589 of SEQ ID NO: 288, or any complement thereof. Another interfering RNA molecule of the invention comprises a dsRNA which comprises, consist essentially of or consists of any 21-mer subsequence of SEQ ID NO: 289, wherein N is nucleotide 1 to nucleotide 349 of SEQ ID NO: 289, or any complement thereof. Another interfering RNA molecule of the invention comprises a dsRNA which comprises, consist essentially of or consists of any 21-mer subsequence of SEQ ID NO: 290, wherein N is nucleotide 1 to nucleotide 529 of SEQ ID NO: 290, or any complement thereof. Another interfering RNA molecule of the invention comprises a dsRNA which comprises, consist essentially of or consists of any 21-mer subsequence of SEQ ID NO: 291, wherein N is nucleotide 1 to nucleotide 5035 of SEQ ID NO: 291, or any complement thereof. Another interfering RNA molecule of the invention comprises a dsRNA which comprises, consist essentially of or consists of any 21-mer subsequence of SEQ ID NO: 292, wherein N is nucleotide 1 to nucleotide 2488 of SEQ ID NO: 292, or any complement thereof. Another interfering RNA molecule of the invention comprises a dsRNA which comprises, consist essentially of or consists of any 21-mer subsequence of SEQ ID NO: 293, wherein N is nucleotide 1 to nucleotide 532 of SEQ ID NO: 293, or any complement thereof. Another interfering RNA molecule of the invention comprises a dsRNA which comprises, consist essentially of or consists of any 21-mer subsequence of SEQ ID NO: 294, wherein N is nucleotide 1 to nucleotide 295 of SEQ ID NO: 294, or any complement thereof. Another interfering RNA molecule of the invention comprises a dsRNA which comprises, consist essentially of or consists of any 21-mer subsequence of SEQ ID NO: 295, wherein N is nucleotide 1 to nucleotide 2311 of SEQ ID NO: 295, or any complement thereof. Another interfering RNA molecule of the invention comprises a dsRNA which comprises, consist essentially of or consists of any 21-mer subsequence of SEQ ID NO: 296, wherein N is nucleotide 1 to nucleotide 2698 of SEQ ID NO: 296, or any complement thereof. Another interfering RNA molecule of the invention comprises a dsRNA which comprises, consist essentially of or consists of any 21-mer subsequence of SEQ ID NO: 297, wherein N is nucleotide 1 to nucleotide 2851 of SEQ ID NO: 297, or any complement thereof. Another interfering RNA molecule of the invention comprises a dsRNA which comprises, consist essentially of or consists of any 21-mer subsequence of SEQ ID NO: 298, wherein N is nucleotide 1 to nucleotide 729 of SEQ ID NO: 298, or any complement thereof. Another interfering RNA molecule of the invention comprises a dsRNA which comprises, consist essentially of or consists of any 21-mer subsequence of SEQ ID NO: 299, wherein N is nucleotide 1 to nucleotide 583 of SEQ ID NO: 299, or any complement thereof. Another interfering RNA molecule of the invention comprises a dsRNA which comprises, consist essentially of or consists of any 21-mer subsequence of SEQ ID NO: 300, wherein N is nucleotide 1 to nucleotide 592 of SEQ ID NO: 300, or any complement thereof. Another interfering RNA molecule of the invention comprises a dsRNA which comprises, consist essentially of or consists of any 21-mer subsequence of SEQ ID NO: 301, wherein N is nucleotide 1 to nucleotide 775 of SEQ ID NO: 301, or any complement thereof. Another interfering RNA molecule of the invention comprises a dsRNA which comprises, consist essentially of or consists of any 21-mer subsequence of SEQ ID NO: 302, wherein N is nucleotide 1 to nucleotide 658 of SEQ ID NO: 302, or any complement thereof. Another interfering RNA molecule of the invention comprises a dsRNA which comprises, consist essentially of or consists of any 21-mer subsequence of SEQ ID NO: 303, wherein N is nucleotide 1 to nucleotide 727 of SEQ ID NO: 303, or any complement thereof. Another interfering RNA molecule of the invention comprises a dsRNA which comprises, consist essentially of or consists of any 21-mer subsequence of SEQ ID NO: 304, wherein N is nucleotide 1 to nucleotide 3001 of SEQ ID NO: 304, or any complement thereof. Another interfering RNA molecule of the invention comprises a dsRNA which comprises, consist essentially of or consists of any 21-mer subsequence of SEQ ID NO: 305, wherein N is nucleotide 1 to nucleotide 367 of SEQ ID NO: 305, or any complement thereof. Another interfering RNA molecule of the invention comprises a dsRNA which comprises, consist essentially of or consists of any 21-mer subsequence of SEQ ID NO: 306, wherein N is nucleotide 1 to nucleotide 2617 of SEQ ID NO: 306, or any complement thereof. Another interfering RNA molecule of the invention comprises a dsRNA which comprises, consist essentially of or consists of any 21-mer subsequence of SEQ ID NO: 307, wherein N is nucleotide 1 to nucleotide 1264 of SEQ ID NO: 307, or any complement thereof. Another interfering RNA molecule of the invention comprises a dsRNA which comprises, consist essentially of or consists of any 21-mer subsequence of SEQ ID NO: 308, wherein N is nucleotide 1 to nucleotide 640 of SEQ ID NO: 308, or any complement thereof. Another interfering RNA molecule of the invention comprises a dsRNA which comprises, consist essentially of or consists of any 21-mer subsequence of SEQ ID NO: 309, wherein N is nucleotide 1 to nucleotide 589 of SEQ ID NO: 309, or any complement thereof. Another interfering RNA molecule of the invention comprises a dsRNA which comprises, consist essentially of or consists of any 21-mer subsequence of SEQ ID NO: 310, wherein N is nucleotide 1 to nucleotide 631 of SEQ ID NO: 310, or any complement thereof. Another interfering RNA molecule of the invention comprises a dsRNA which comprises, consist essentially of or consists of any 21-mer subsequence of SEQ ID NO: 311, wherein N is nucleotide 1 to nucleotide 529 of SEQ ID NO: 311, or any complement thereof. Another interfering RNA molecule of the invention comprises a dsRNA which comprises, consist essentially of or consists of any 21-mer subsequence of SEQ ID NO: 312, wherein N is nucleotide 1 to nucleotide 5035 of SEQ ID NO: 312, or any complement thereof. Another interfering RNA molecule of the invention comprises a dsRNA which comprises, consist essentially of or consists of any 21-mer subsequence of SEQ ID NO: 313, wherein N is nucleotide 1 to nucleotide 3652 of SEQ ID NO: 313, or any complement thereof. Another interfering RNA molecule of the invention comprises a dsRNA which comprises, consist essentially of or consists of any 21-mer subsequence of SEQ ID NO: 314, wherein N is nucleotide 1 to nucleotide 532 of SEQ ID NO: 314, or any complement thereof. Another interfering RNA molecule of the invention comprises a dsRNA which comprises, consist essentially of or consists of any 21-mer subsequence of SEQ ID NO: 315, wherein N is nucleotide 1 to nucleotide 295 of SEQ ID NO: 315, or any complement thereof. Another interfering RNA molecule of the invention comprises a dsRNA which comprises, consist essentially of or consists of any 21-mer subsequence of SEQ ID NO: 616, wherein N is nucleotide 1 to nucleotide 2314 of SEQ ID NO: 616, or any complement thereof. Another interfering RNA molecule of the invention comprises a dsRNA which comprises, consist essentially of or consists of any 21-mer subsequence of SEQ ID NO: 617, wherein N is nucleotide 1 to nucleotide 2701 of SEQ ID NO: 617, or any complement thereof. Another interfering RNA molecule of the invention comprises a dsRNA which comprises, consist essentially of or consists of any 21-mer subsequence of SEQ ID NO: 618, wherein N is nucleotide 1 to nucleotide 2851 of SEQ ID NO: 618, or any complement thereof. Another interfering RNA molecule of the invention comprises a dsRNA which comprises, consist essentially of or consists of any 21-mer subsequence of SEQ ID NO: 619, wherein N is nucleotide 1 to nucleotide 799 of SEQ ID NO: 619, or any complement thereof. Another interfering RNA molecule of the invention comprises a dsRNA which comprises, consist essentially of or consists of any 21-mer subsequence of SEQ ID NO: 620, wherein N is nucleotide 1 to nucleotide 583 of SEQ ID NO: 620, or any complement thereof. Another interfering RNA molecule of the invention comprises a dsRNA which comprises, consist essentially of or consists of any 21-mer subsequence of SEQ ID NO: 621, wherein N is nucleotide 1 to nucleotide 536 of SEQ ID NO: 621, or any complement thereof. Another interfering RNA molecule of the invention comprises a dsRNA which comprises, consist essentially of or consists of any 21-mer subsequence of SEQ ID NO: 622, wherein N is nucleotide 1 to nucleotide 696 of SEQ ID NO: 622, or any complement thereof. Another interfering RNA molecule of the invention comprises a dsRNA which comprises, consist essentially of or consists of any 21-mer subsequence of SEQ ID NO: 623, wherein N is nucleotide 1 to nucleotide 492 of SEQ ID NO: 623, or any complement thereof. Another interfering RNA molecule of the invention comprises a dsRNA which comprises, consist essentially of or consists of any 21-mer subsequence of SEQ ID NO: 624, wherein N is nucleotide 1 to nucleotide 727 of SEQ ID NO: 624, or any complement thereof. Another interfering RNA molecule of the invention comprises a dsRNA which comprises, consist essentially of or consists of any 21-mer subsequence of SEQ ID NO: 625, wherein N is nucleotide 1 to nucleotide 2998 of SEQ ID NO: 625, or any complement thereof. Another interfering RNA molecule of the invention comprises a dsRNA which comprises, consist essentially of or consists of any 21-mer subsequence of SEQ ID NO: 626, wherein N is nucleotide 1 to nucleotide 367 of SEQ ID NO: 626, or any complement thereof. Another interfering RNA molecule of the invention comprises a dsRNA which comprises, consist essentially of or consists of any 21-mer subsequence of SEQ ID NO: 627, wherein N is nucleotide 1 to nucleotide 2620 of SEQ ID NO: 627, or any complement thereof. Another interfering RNA molecule of the invention comprises a dsRNA which comprises, consist essentially of or consists of any 21-mer subsequence of SEQ ID NO: 628, wherein N is nucleotide 1 to nucleotide 1264 of SEQ ID NO: 628, or any complement thereof. Another interfering RNA molecule of the invention comprises a dsRNA which comprises, consist essentially of or consists of any 21-mer subsequence of SEQ ID NO: 629, wherein N is nucleotide 1 to nucleotide 640 of SEQ ID NO: 629, or any complement thereof. Another interfering RNA molecule of the invention comprises a dsRNA which comprises, consist essentially of or consists of any 21-mer subsequence of SEQ ID NO: 630, wherein N is nucleotide 1 to nucleotide 589 of SEQ ID NO: 630, or any complement thereof. Another interfering RNA molecule of the invention comprises a dsRNA which comprises, consist essentially of or consists of any 21-mer subsequence of SEQ ID NO: 631, wherein N is nucleotide 1 to nucleotide 631 of SEQ ID NO: 631, or any complement thereof. Another interfering RNA molecule of the invention comprises a dsRNA which comprises, consist essentially of or consists of any 21-mer subsequence of SEQ ID NO: 632, wherein N is nucleotide 1 to nucleotide 529 of SEQ ID NO: 632, or any complement thereof. Another interfering RNA molecule of the invention comprises a dsRNA which comprises, consist essentially of or consists of any 21-mer subsequence of SEQ ID NO: 633, wherein N is nucleotide 1 to nucleotide 4587 of SEQ ID NO: 633, or any complement thereof. Another interfering RNA molecule of the invention comprises a dsRNA which comprises, consist essentially of or consists of any 21-mer subsequence of SEQ ID NO: 634, wherein N is nucleotide 1 to nucleotide 3652 of SEQ ID NO: 634, or any complement thereof. Another interfering RNA molecule of the invention comprises a dsRNA which comprises, consist essentially of or consists of any 21-mer subsequence of SEQ ID NO: 635, wherein N is nucleotide 1 to nucleotide 532 of SEQ ID NO: 635, or any complement thereof. Another interfering RNA molecule of the invention comprises a dsRNA which comprises, consist essentially of or consists of any 21-mer subsequence of SEQ ID NO: 636, wherein N is nucleotide 1 to nucleotide 295 of SEQ ID NO: 636, or any complement thereof. Another interfering RNA molecule of the invention comprises a dsRNA which comprises, consist essentially of or consists of any 21-mer subsequence of SEQ ID NO: 637, wherein N is nucleotide 1 to nucleotide 2320 of SEQ ID NO: 637, or any complement thereof. Another interfering RNA molecule of the invention comprises a dsRNA which comprises, consist essentially of or consists of any 21-mer subsequence of SEQ ID NO: 638, wherein N is nucleotide 1 to nucleotide 2698 of SEQ ID NO: 638, or any complement thereof. Another interfering RNA molecule of the invention comprises a dsRNA which comprises, consist essentially of or consists of any 21-mer subsequence of SEQ ID NO: 639, wherein N is nucleotide 1 to nucleotide 2804 of SEQ ID NO: 639, or any complement thereof. Another interfering RNA molecule of the invention comprises a dsRNA which comprises, consist essentially of or consists of any 21-mer subsequence of SEQ ID NO: 640, wherein N is nucleotide 1 to nucleotide 1501 of SEQ ID NO: 640, or any complement thereof. Another interfering RNA molecule of the invention comprises a dsRNA which comprises, consist essentially of or consists of any 21-mer subsequence of SEQ ID NO: 641, wherein N is nucleotide 1 to nucleotide 583 of SEQ ID NO: 641, or any complement thereof. Another interfering RNA molecule of the invention comprises a dsRNA which comprises, consist essentially of or consists of any 21-mer subsequence of SEQ ID NO: 642, wherein N is nucleotide 1 to nucleotide 464 of SEQ ID NO: 642, or any complement thereof. Another interfering RNA molecule of the invention comprises a dsRNA which comprises, consist essentially of or consists of any 21-mer subsequence of SEQ ID NO: 643, wherein N is nucleotide 1 to nucleotide 775 of SEQ ID NO: 643, or any complement thereof. Another interfering RNA molecule of the invention comprises a dsRNA which comprises, consist essentially of or consists of any 21-mer subsequence of SEQ ID NO: 644, wherein N is nucleotide 1 to nucleotide 658 of SEQ ID NO: 644, or any complement thereof. Another interfering RNA molecule of the invention comprises a dsRNA which comprises, consist essentially of or consists of any 21-mer subsequence of SEQ ID NO: 645, wherein N is nucleotide 1 to nucleotide 727 of SEQ ID NO: 645, or any complement thereof. Another interfering RNA molecule of the invention comprises a dsRNA which comprises, consist essentially of or consists of any 21-mer subsequence of SEQ ID NO: 646, wherein N is nucleotide 1 to nucleotide 3001 of SEQ ID NO: 646, or any complement thereof. Another interfering RNA molecule of the invention comprises a dsRNA which comprises, consist essentially of or consists of any 21-mer subsequence of SEQ ID NO: 647, wherein N is nucleotide 1 to nucleotide 364 of SEQ ID NO: 647, or any complement thereof. Another interfering RNA molecule of the invention comprises a dsRNA which comprises, consist essentially of or consists of any 21-mer subsequence of SEQ ID NO: 648, wherein N is nucleotide 1 to nucleotide 2620 of SEQ ID NO: 648, or any complement thereof. Another interfering RNA molecule of the invention comprises a dsRNA which comprises, consist essentially of or consists of any 21-mer subsequence of SEQ ID NO: 649, wherein N is nucleotide 1 to nucleotide 1264 of SEQ ID NO: 649, or any complement thereof. Another interfering RNA molecule of the invention comprises a dsRNA which comprises, consist essentially of or consists of any 21-mer subsequence of SEQ ID NO: 650, wherein N is nucleotide 1 to nucleotide 640 of SEQ ID NO: 650, or any complement thereof. Another interfering RNA molecule of the invention comprises a dsRNA which comprises, consist essentially of or consists of any 21-mer subsequence of SEQ ID NO: 651, wherein N is nucleotide 1 to nucleotide 589 of SEQ ID NO: 651, or any complement thereof. Another interfering RNA molecule of the invention comprises a dsRNA which comprises, consist essentially of or consists of any 21-mer subsequence of SEQ ID NO: 652, wherein N is nucleotide 1 to nucleotide 631 of SEQ ID NO: 652, or any complement thereof. Another interfering RNA molecule of the invention comprises a dsRNA which comprises, consist essentially of or consists of any 21-mer subsequence of SEQ ID NO: 653, wherein N is nucleotide 1 to nucleotide 529 of SEQ ID NO: 653, or any complement thereof. Another interfering RNA molecule of the invention comprises a dsRNA which comprises, consist essentially of or consists of any 21-mer subsequence of SEQ ID NO: 654, wherein N is nucleotide 1 to nucleotide 4471 of SEQ ID NO: 654, or any complement thereof. Another interfering RNA molecule of the invention comprises a dsRNA which comprises, consist essentially of or consists of any 21-mer subsequence of SEQ ID NO: 655, wherein N is nucleotide 1 to nucleotide 3652 of SEQ ID NO: 655, or any complement thereof. Another interfering RNA molecule of the invention comprises a dsRNA which comprises, consist essentially of or consists of any 21-mer subsequence of SEQ ID NO: 656, wherein N is nucleotide 1 to nucleotide 526 of SEQ ID NO: 656, or any complement thereof. Another interfering RNA molecule of the invention comprises a dsRNA which comprises, consist essentially of or consists of any 21-mer subsequence of SEQ ID NO: 657, wherein N is nucleotide 1 to nucleotide 295 of SEQ ID NO: 657, or any complement thereof.

[0228] In some embodiments of the method of controlling a flea beetle insect pest, the insect is from the tribe Alticini. In further embodiments, the insect is a species of a genus selected from the group consisting of the genera Altica, Anthobiodes, Aphthona, Aphthonaltica, Aphthonoides, Apteopeda, Argopistes, Argopus, Arrhenocoela, Batophila, Blepharida, Chaetocnema, Clitea, Crepidodera, Derocrepis, Dibolia, Disonycha, Epitrix, Hermipyxis, Hermaeophaga, Hespera, Hippuriphila, Horaia, Hyphasis, Lipromima, Liprus, Longitarsus, Luperomorpha, Lythraria, Manobia, Mantura, Meishania, Minota, Mniophila, Neicrepidodera, Nonarthra, Novofoudrasia, Ochrosis, Oedionychis, Oglobinia, Omeisphaera, Ophrida, Orestia, Paragopus, Pentamesa, Philopona, Phygasia, Phyllotreta, Podagrica, Podagricomela, Podontia, Pseudodera, Psylliodes, Sangariola, Sinaltica, Sphaeroderma, Systena, Trachyaphthona, Xuthea, and Zipangia. In embodiments, the insect is a species selected from the group consisting of Altica ambiens (alder flea beetle), Altica canadensis (prairie flea beetle), Altica chalybaea (grape flea beetle), Altica prasina (poplar flea beetle), Altica rosae (rose flea beetle), Altica sylvia (blueberry flea beetle), Altica ulmi (elm flea beetle), Chaetocnema pulicaria (corn flea beetle), Chaetocnema conofinis (sweet potato flea beetle), Epitrix cucumeris (potato flea beetle), Systena blanda (palestripped flea beetle), and Systena frontalis (redheaded flea beetle). In embodiments, the insect is a species selected from the group consisting of Phyllotreta armoraciae (horseradish flea beetle), Phyllotreta cruciferae (canola flea beetle), Phyllotreta pusilla (western black flea beetle), Phyllotreta nemorum (striped turnip flea beetle), Phyllotreta atra (turnip flea beetle), Phyllotreta robusta (garden flea beetle), Phyllotreta striolata (striped flea beetle), Phyllotreta undulata, Psylliodes chrysocephala, and Psylliodes punctulata (hop flea beetle).

[0229] In other embodiments of the method of controlling a Coleopteran insect pest or a flea beetle pest, the contacting comprises (a) planting a transgenic seed capable of producing a transgenic plant that expresses the nucleic acid molecule, wherein the insect feeds on the transgenic plant, or part thereof; or (b) applying a composition comprising the nucleic acid molecule to a seed or plant, or part thereof, wherein the insect feeds on the seed, the plant, or a part thereof. In some embodiments, the transgenic seed and the transgenic plant is a canola seed or a canola plant. In other embodiments the seed or plant is a canola seed or a canola plant.

[0230] The invention also encompasses a method of controlling a flea beetle comprising contacting the flea beetle with a nucleic acid molecule that is or is capable of producing the interfering RNA molecule of the invention for inhibiting expression of a target gene in the flea beetle, and also contacting the flea beetle with at least a second insecticidal agent for controlling the flea beetle, wherein said second insecticidal agent comprises a B. thuringiensis insecticidal protein, thereby controlling the flea beetle. The invention also encompasses a method for controlling flea beetle pests on a plant, comprising topically applying to said plant a pesticide composition comprising an interfering RNA of the invention and at least a second insecticidal agent for controlling the flea beetle, wherein said second insecticidal agent does not comprise a B. thuringiensis insecticidal protein, and providing said plant in the diet of said flea beetle. The invention also encompasses a method wherein the second insecticidal agent comprises a patatin, a protease, a protease inhibitor, a urease, an alpha-amylase inhibitor, a pore-forming protein, a lectin, an engineered antibody or antibody fragment, or a chitinase. The second insecticidal agent may also be a Bacillus cereus insecticidal protein, a Xenorhabdus spp. insecticidal protein, a Photorhabdus spp. insecticidal protein, a Brevibacillus laterosporous insecticidal protein, a Lysinibacillus sphearicus insecticidal protein, a Chromobacterium ssp. insecticidal protein, a Yersinia entomophaga insecticidal protein, a Paenibacillus popiliae insecticidal protein, or a Clostridium spp. insecticidal protein.

[0231] The invention also encompasses a method of reducing an adult Coleopteran insect population or an adult flea beetle population on a transgenic plant expressing a Cry protein, a hybrid Cry protein or modified Cry protein comprising expressing in the transgenic plant a nucleic acid molecule that is or is capable of producing an interfering RNA molecule of the invention capable of inhibiting expression of a target gene as described herein in an adult insect, thereby reducing the adult Coleopteran insect population or adult flea beetle population.

[0232] In some embodiments, the invention encompasses a method of reducing the level of a target mRNA transcribable from a target gene as described herein in a Coleopteran insect or a flea beetle comprising contacting the insect with a composition comprising the interfering RNA molecule of the invention, wherein the interfering RNA molecule reduces the level of the target mRNA in a cell of the insect. In some embodiments, the interfering RNA of the method comprises at least one dsRNA, wherein the dsRNA is a region of double-stranded RNA comprising annealed complementary strands, one strand of which comprises a sequence of at least 19 contiguous nucleotides which (i) has at least 80% identity, at least 85% identity, at least 86% identity, at least 87% identity, at least 88% identity, at least 89% identity, at least 90% identity, at least 91% identity, at least 92% identity, at least 93% identity, at least 94% identity, at least 95% identity, at least 96% identity, at least 97% identity, at least 98% identity, at least 99% identity, or 100% identity, to at least a 19, at least a 20, at least a 21, at least a 22, at least a 23, at least a 24, at least a 25, at least a 26, at least a 27, at least a 28, at least a 29, at least a 30, at least a 35, at least a 40, at least a 45, at least a 50, at least a 55, at least a 60, at least a 65, at least a 70, at least a 75, at least a 80, at least a 85, at least a 90, at least a 95, at least a 100, at least a 110, at least a 120, at least a 130, at least a 140, at least a 150, at least a 160, at least a 170, at least a 180, at least a 190, at least a 200, at least a 210, at least a 220, at least a 230, at least a 240, at least a 250, at least a 260, at least a 270, at least a 280, at least a 290, or at least a 300 contiguous nucleotide fragment of SEQ ID NO: 253-378 or SEQ ID NO: 616-701, or the complement thereof; (ii) comprises at least a 19, at least a 20, at least a 21, at least a 22, at least a 23, at least a 24, at least a 25, at least a 26, at least a 27, at least a 28, at least a 29, at least a 30, at least a 35, at least a 40, at least a 45, at least a 50, at least a 55, at least a 60, at least a 65, at least a 70, at least a 75, at least a 80, at least a 85, at least a 90, at least a 95, at least a 100, at least a 110, at least a 120, at least a 130, at least a 140, at least a 150, at least a 160, at least a 170, at least a 180, at least a 190, at least a 200, at least a 210, at least a 220, at least a 230, at least a 240, at least a 250, at least a 260, at least a 270, at least a 280, at least a 290, or at least a 300 contiguous nucleotide fragment of SEQ ID NO: 253-378 or SEQ ID NO: 616-701, or the complement thereof; (iii) comprises at least a 19, at least a 20, at least a 21, at least a 22, at least a 23, at least a 24, at least a 25, at least a 26, at least a 27, at least a 28, at least a 29, at least a 30, at least a 35, at least a 40, at least a 45, at least a 50, at least a 55, at least a 60, at least a a 65, at least a 70, at least a 75, at least a 80, at least a 85, at least a 90, at least a 95, at least a 100, at least a 110, at least a 120, at least a 130, at least a 140, at least a 150, at least a 160, at least a 170, at least a 180, at least a 190, at least a 200, at least a 210, at least a 220, at least a 230, at least a 240, at least a 250, at least a 260, at least a 270, at least a 280, at least a 290, or at least a 300 contiguous nucleotide fragment of a nucleotide sequence encoding an amino acid sequence encoded by SEQ ID NO: 253-378 or SEQ ID NO: 616-701, or the complement thereof, or (iv) can hybridize under stringent conditions to a polynucleotide selected from the group consisting of SEQ ID NO: 253-378 or SEQ ID NO: 616-701, and the complements thereof, wherein the interfering RNA molecule has insecticidal activity against the target Coleopteran insect or a flea beetle. In another embodiment, the contacting is achieved by the target insect feeding on the composition. In other embodiments, production of the protein encoded by the target mRNA is reduced. In other embodiments, the target protein comprises an amino acid having at least about 80%, at least about 85%, at least about 90%, at least about 91%, at least about 92%, at least about 93%, at least about 94%, at least about 95%, at least about 96%, at least about 97%, at least about 98% or at least about 99% identity to SEQ ID NO: 379-441 or SEQ ID NO: 702-743. In other embodiments the target protein comprises SEQ ID NO: 379-441 or SEQ ID NO: 702-743. In other embodiments, the interfering RNA is contacted with a Coleopteran insect or a flea beetle through a transgenic organism expressing the interfering RNA. In other embodiments, the transgenic organism is a transgenic plant, a transgenic microorganism, a transgenic bacterium or a transgenic endophyte. In other embodiments, the interfering RNA is contacted with a Coleopteran insect or a flea beetle by topically applying an interfering RNA in an acceptable agricultural carrier to a plant or plant part on which the insect feeds. In some embodiments, the interfering RNA that reduces the level of a target mRNA transcribable from a target gene described herein is lethal to the Coleopteran insect or flea beetle. In some embodiments, the flea beetle a member of the Alticini tribe. In some embodiments, the flea beetle is a species of a genus selected from the group consisting of the genera Altica, Anthobiodes, Aphthona, Aphthonaltica, Aphthonoides, Apteopeda, Argopistes, Argopus, Arrhenocoela, Batophila, Blepharida, Chaetocnema, Clitea, Crepidodera, Derocrepis, Dibolia, Disonycha, Epitrix, Hermipyxis, Hermaeophaga, Hespera, Hippuriphila, Horaia, Hyphasis, Lipromima, Liprus, Longitarsus, Luperomorpha, Lythraria, Manobia, Mantura, Meishania, Minota, Mniophila, Neicrepidodera, Nonarthra, Novofoudrasia, Ochrosis, Oedionychis, Oglobinia, Omeisphaera, Ophrida, Orestia, Paragopus, Pentamesa, Philopona, Phygasia, Phyllotreta, Podagrica, Podagricomela, Podontia, Pseudodera, Psylliodes, Sangariola, Sinaltica, Sphaeroderma, Systena, Trachyaphthona, Xuthea, and Zipangia. In embodiments, the insect is a species selected from the group consisting of Altica ambiens (alder flea beetle), Altica canadensis (prairie flea beetle), Altica chalybaea (grape flea beetle), Altica prasina (poplar flea beetle), Altica rosae (rose flea beetle), Altica sylvia (blueberry flea beetle), Altica ulmi (elm flea beetle), Chaetocnema pulicaria (corn flea beetle), Chaetocnema conofinis (sweet potato flea beetle), Epitrix cucumeris (potato flea beetle), Systena blanda (palestripped flea beetle), and Systena frontalis (redheaded flea beetle). In embodiments, the insect is a species selected from the group consisting of Phyllotreta armoraciae (horseradish flea beetle), Phyllotreta cruciferae (canola flea beetle), Phyllotreta pusilla (western black flea beetle), Phyllotreta nemorum (striped turnip flea beetle), Phyllotreta atra (turnip flea beetle), Phyllotreta robusta (garden flea beetle), Phyllotreta striolata (striped flea beetle), Phyllotreta undulata, Psylliodes chrysocephala, and Psylliodes punctulata (hop flea beetle).

[0233] In some embodiments, the invention encompasses a method of conferring Coleopteran insect tolerance or flea beetle tolerance to a plant, or part thereof, comprising introducing into the plant, or part thereof, an interfering RNA molecule, a dsRNA molecule, a nucleic acid construct, a chimeric nucleic acid molecule, an artificial plant microRNA precursor molecule and/or a composition of the invention, wherein the dsRNA molecule, nucleic acid construct, chimeric nucleic acid molecule, artificial plant microRNA precursor molecule and/or composition of the invention are toxic to the insect, thereby conferring tolerance of the plant or part thereof to the Coleopteran insect or flea beetle. In other embodiments, the introducing step is performed by transforming a plant cell and producing the transgenic plant from the transformed plant cell. In still other embodiments, the introducing step is performed by breeding two plants together.

[0234] In other embodiments, the invention encompasses a method of reducing damage to the plant fed upon by a flea beetle, comprising introducing into cells of the plant an interfering RNA molecule, a dsRNA, a nucleic acid molecule, a nucleic acid construct, a chimeric nucleic acid molecule, an artificial plant microRNA precursor molecule and/or a composition of the invention, wherein the dsRNA, nucleic acid molecule, nucleic acid construct, chimeric nucleic acid molecule, artificial plant microRNA precursor molecule and/or composition of the invention are toxic to the flea beetle, thereby reducing damage to the plant. In other embodiments, the introducing step is performed by transforming a plant cell and producing the transgenic plant from the transformed plant cell. In still other embodiments, the introducing step is performed by breeding two plants together.

[0235] In still other embodiments, the invention encompasses a method of producing a transgenic plant cell having toxicity to a Coleopteran insect or flea beetle, comprising introducing into a plant cell an interfering RNA molecule, a dsRNA, a nucleic acid molecule, a nucleic acid construct, a chimeric nucleic acid molecule, an artificial plant microRNA precursor molecule and/or a composition of the invention, thereby producing the transgenic plant cell having toxicity to the insect compared to a control plant cell. In some embodiments, the invention encompasses a plurality of transgenic plant cells produced by this method. In other embodiments, the plurality of transgenic plant cells is grown under conditions which include natural sunlight. In other embodiments, the introducing step is performed by transforming a plant cell and producing the transgenic plant from the transformed plant cell. In still other embodiments, the introducing step is performed by breeding two plants together.

[0236] In some embodiments, the invention encompasses a method of producing a transgenic plant having enhanced tolerance to Coleopteran or flea beetle feeding damage, comprising introducing into a plant an interfering RNA molecule, a dsRNA, a nucleic acid molecule, a nucleic acid construct, a chimeric nucleic acid molecule, an artificial plant microRNA precursor molecule and/or a composition of the invention, thereby producing a transgenic plant having enhanced tolerance to Coleopteran or flea beetle feeding damage compared to a control plant. In other embodiments, the introducing step is performed by transforming a plant cell and producing the transgenic plant from the transformed plant cell. In still other embodiments, the introducing step is performed by breeding two plants together.

[0237] In some embodiments, the invention encompasses a method of providing a canola grower with a means of controlling a Coleopteran insect pest population or a flea beetle pest population in a canola crop comprising (a) selling or providing to the grower transgenic canola seed that comprises an interfering RNA, a nucleic acid molecule, a nucleic acid construct, a chimeric nucleic acid molecule, an artificial plant microRNA precursor molecule and/or a composition of the invention; and (b) advertising to the grower that the transgenic canola seed produce transgenic canola plants that control a Coleopteran or flea beetle pest population.

[0238] In some embodiments, the invention encompasses a method of identifying a target gene for using as a RNAi strategy for the control of a plant pest for RNAi in a Coleopteran plant pest, said method comprising the steps of a) producing a primer pair which can amplify a sequence that is or is orthologous to SEQ ID NO: 1-126 or SEQ ID NO: 442-527, or a complement thereof; b) amplifying an orthologous target from a nucleic acid sample of the plant pest; c) identifying a sequence of an orthologous target gene; d) producing an interfering RNA molecule, wherein the RNA comprises at least one dsRNA, wherein the dsRNA is a region of double-stranded RNA comprising annealed complementary strands, one strand of which comprises a sequence of at least 19 contiguous nucleotides which is at least partially complementary to a target nucleotide sequence within a Coleopteran target gene, is obtained; and e) determining if the interfering RNA molecule has insecticidal activity on the plant pest. If the interfering RNA has insecticidal activity on the Coleopteran pest, a target gene for using in the control of the plant pest has been identified. In some embodiments, the plant pest is a Coleopteran plant pest.

### EXAMPLES

[0239] The invention will be further described by reference to the following detailed examples. These examples are provided for the purposes of illustration only, and are not intended to be limiting unless otherwise specified.

### Example 1. Identification of Potential RNAi Gene Targets in Flea Beetle Species

[0240] This example describes the cloning and sequencing of RNAi target genes and coding sequences from Psylliodes chrysocephala, Phyllotreta nemorum, Phyllotreta striolata, Phyllotreta cruciferae, and from Phyllotreta armoraciae insects.

[0241] Target gene selection was based on known lethal genes in other organisms, which were identified based on published disclosures including WO2012/143543, WO2012/143542, WO2018/026770, WO2018/026773, and WO2018/026774. From this analysis, several targets were identified. Each of these target genes is known to possess an allele(s) which is lethal, or is known to result in lethality when targeted by RNAi, in either Diabrotica virgifera virgifera, Leptinotarsa decemlineata, Lygus hesperus, or a combination thereof. Therefore, each of these targets were considered likely to confer an insecticidal effect when targeted with a dsRNA molecule against the native gene.

[0242] dsRNAs based on the selected targets were produced on an 96 well semi-automated library synthesis platform. Templates for the dsRNA molecules were produced based on publicly available or internally developed transcriptome information for the P. chrysocephala, P. nemorum, P. striolata, P. cruciferae and P. armoraciae targets. All the dsRNA samples tested were produced using primers designed automatically using Primer3, a primer design tool, to synthetize a dsRNA fragment of around 500-600 bp based on the coding sequence of each target gene. Smaller fragments were designed if the size of the coding sequence did not allow a 500 bp fragment.

### Example 2: Identification of Target Genes from Flea Beetle Species

[0243] The dsRNA molecules described above were tested for toxicity against their respective insect pest species in laboratory bioassays. In other words, dsRNAs based on coding sequences from P. chrysocephala were tested against P. chrysocephala insects, dsRNAs based on coding sequences from P. nemorum were tested against P. nemorum insects, dsRNAs based on coding sequences from P. striolata were tested against P. striolata insects, dsRNAs based on coding sequences from P. armoraciae were tested against P. armoraciae insects, and dsRNAs based on coding sequences from P. cruciferae were tested against P. cruciferae insects.

Identification of Target Genes from P. chrysocephala

[0244] Bioassays were performed using an RNA-treated artificial diet method. Briefly, synthesized dsRNA molecules were diluted to the appropriate concentration in a sucrose solution. Samples containing dsRNA and sucrose are heated up to 60° C. An agarose solution was heated to boiling and added to the dsRNA dilutions, leading to final concentrations of 5% sucrose and 0.5% agarose. The agarose solution containing the dsRNA was divided over three petri dishes (diameter=3 cm), the final dose being 67 μg of dsRNA per petri dish. Ten to twelve adults were added to each petri dish to have between 30 and 36 adults per treatment. Each petri dish was maintained at approximately 25° C. and 16:8 light:dark photoperiod. Mortality was recorded at different days post-infestation, with the final survival percentage calculated at 12 days with Abbott correction. dsRNA designed to target green fluorescent protein (GFP) was used as a negative control. Results are depicted in Table 1.

Identification of Target Genes from P. nemorum

[0245] Bioassays were performed using an RNA-treated artificial diet method. Briefly, synthesized dsRNA molecules were diluted to the appropriate concentration in a sucrose solution. Samples containing dsRNA and sucrose are heated up to 60° C. An agarose solution was heated to boiling and added to the dsRNA dilutions, leading to final concentrations of 5% sucrose and 0.5% agarose. The agarose solution containing the dsRNA was divided over three petri dishes (diameter=3 cm), the final dose being 67 μg of dsRNA per petri dish. Ten to twelve adults were added to each petri dish to have between 30 and 36 adults per treatment. Each petri dish was maintained at approximately 25° C. and 16:8 light:dark photoperiod. Mortality was recorded at different days post-infestation, with the final survival percentage calculated at 12 days with Abbott correction. dsRNA designed to target green fluorescent protein (GFP) was used as a negative control. Results are depicted in Table 1.

Identification of Target Genes from P. striolata

[0246] Bioassays were performed using an RNA-treated leaf disc method. Briefly, synthesized dsRNA molecules were diluted to the appropriate concentration and applied to canola leaf discs (5 mm diameter), coating the top surface with a final dose of 20 ng/mm². Leaf disks were placed in 20 mL plastic cups with ten beetles per cup. Beetles were fed fresh leaf discs, coated with dsRNA, every second day, for a period of two weeks. The cups were maintained at approximately 25° C. and 16:8 light:dark photoperiod. The number of dead adults was recorded every second day (when fresh leaf discs are provided), with the final survival percentage calculated at 14 days with Abbott correction. dsRNA designed to target green fluorescent protein (GFP) was used as a negative control. Results are depicted in Table 1.

[0247] Identification of Target Genes from P. armoraciae

[0248] Bioassays are performed using an RNA-treated artificial diet method. Briefly, synthesized dsRNA molecules are diluted to the appropriate concentration in a sucrose solution. The solution containing the dsRNA is divided over three wells of a 96-well plate, the final dose being 1 μg/μl dsRNA in 5% sucrose per well. The plates are then sealed and six pinholes per well are made through the seals. Eight adults per well are added to a 6-well plate which is attached to the reversed sample plate by the use of tape, allowing the insects to feed on the droplets. On day 3 the dsRNA solution is replaced by a 15% sucrose solution to keep the insects until the end of the assay. Each assay is maintained at approximately 25° C. and 16:8 light:dark photoperiod. Mortality is recorded at different days post-infestation, with the final survival percentage calculated at 10 up to 17 days with Abbott correction. dsRNA designed to target green fluorescent protein (GFP) is used as a negative control. dsRNA designed to the specific ubiquitin protein is used as a positive control. Results are depicted in Table 1.

Identification of Target Genes from P. cruciferae

[0249] Bioassays are performed using an RNA-treated artificial diet method. Briefly, synthesized dsRNA molecules are diluted to the appropriate concentration in a sucrose solution. The solution containing the dsRNA is divided over three wells of a 96-well plate, the final dose being 1 μg/μl dsRNA in 5% sucrose per well. The plates are then sealed and six pinholes per well are made through the seals. Eight adults per well are added to a 6-well plate which is attached to the reversed sample plate by the use of tape, allowing the insects to feed on the droplets. On day 3 the dsRNA solution is replaced by a 15% sucrose solution to keep the insects until the end of the assay. Each assay is maintained at approximately 25° C. and 16:8 light:dark photoperiod. Mortality is recorded at different days post-infestation, with the final survival percentage calculated at 10 up to 17 days with Abbott correction. dsRNA designed to target green fluorescent protein (GFP) is used as a negative control. dsRNA designed to the specific ubiquitin protein is used as a positive control. Results are depicted in Table 1.

[0250] For Table 1, the target gene is named. The Target ID is also named for each ortholog from each flea beetle species tested. “Pc” indicates the target ID is from P. chrysocephala, “Pn” indicates the target ID is from P. nemorum, “Ps” indicates the target ID is from P. striolata, “Pa” indicates the target ID is from P. armoraciae, and “Pu” indicates the target ID is from P. cruciferae. The “SEQ ID NO.” indicates the RNA sequence of the sense strand of the dsRNA tested. “Survival %” is the final survival percentage calculated, with Abbott correction, for each insect bioassay.

TABLE 1
Activity of dsRNA molecules against flea beetle species
Table 1a

| | Pc | | | Pn | | |
|---|---|---|---|---|---|---|
| Target | Target | SEQ ID | Survival | Target | SEQ ID | Survival |
| gene | ID | NO. | % | ID | NO. | % |
| GFP | | | 100 | | | 100 |
| Sec23 | Pc1 | 316 | | Pn1 | 337 | 27.9 |
| beta′COP | Pc2 | 317 | | Pn2 | 338 | 31.8 |
| betaCOP | Pc3 | 318 | 21.3 | Pn3 | 339 | |
| Ubi-p5E | Pc4 | 319 | 0 | Pn4 | 340 | 0 |
| Prosbeta4 | Pc5 | 320 | 12 | Pn5 | 341 | 48.8 |
| wupA | Pc6 | 321 | | Pn6 | 342 | 96.2 |
| RpL6 | Pc7 | 322 | | Pn7 | 343 | 38.7 |
| Prosbeta1 | Pc8 | 323 | 8.9 | Pn8 | 344 | 8.9 |
| Tsp2A | Pc9 | 324 | | Pn9 | 345 | 26.9 |
| Rpn2 | Pc13 | 325 | | Pn13 | 346 | 38.5 |
| RpL40 | Pc25 | 326 | | Pn25 | 347 | 7.4 |
| gammaCOP | Pc26 | 327 | | Pn26 | 348 | 23.1 |
| Rpt5 | Pc27 | 328 | 10.5 | Pn27 | 349 | 13.3 |
| shrb | Pc28 | 329 | 3.5 | Pn28 | 350 | 39.9 |
| Rab1 | Pc34 | 330 | 4.7 | Pn34 | 351 | 30.8 |
| Rab5 | Pc35 | 331 | | Pn35 | 352 | 64.2 |
| Arf79F | Pc36 | 332 | | Pn36 | 353 | 3.8 |
| Chc | Pc37 | 333 | | Pn37 | 354 | 11.5 |
| alphaCOP | Pc44 | 334 | | Pn44 | 355 | 38.5 |
| RpL17 | Pc49 | 335 | | Pn49 | 356 | 39.9 |
| RpL36A | Pc52 | 336 | | Pn52 | 357 | 57.7 |

TABLE 1b

| | Ps | | | Pa | | |
|---|---|---|---|---|---|---|
| Target | Target | SEQ ID | Survival | Target | SEQ ID | Survival |
| gene | ID | NO. | % | ID | NO | % |
| GFP | | | 100 | | | |
| Sec23 | Ps1 | 358 | 6 | Pa1 | 658 | 9.1 |
| beta′COP | Ps2 | 359 | 0 | Pa2 | 660 | 26.9 |
| betaCOP | Ps3 | 360 | 13.9 | Pa3 | 661 | 12.2 |
| Ubi-p5E | Ps4 | 361 | 0 | Pa4 | 662 | 23.8 |
| Prosbeta4 | Ps5 | 362 | 13.75 | Pa5 | 664 | 47.4 |
| wupA | Ps6 | 363 | | Pa6 | 665 | 94.5 |
| RpL6 | Ps7 | 364 | 17.8 | Pa7 | 666 | 62.7 |
| Prosbeta1 | Ps8 | 365 | 16.65 | Pa8 | 667 | 68.3 |
| Tsp2A | Ps9 | 366 | 18 | Pa9 | 668 | 42.1 |
| Rpn2 | Ps13 | 367 | 6 | Pa13 | 669 | 4.8 |
| RpL40 | Ps25 | 368 | 0 | Pa25 | 670 | 39.3 |
| gammaCOP | Ps26 | 369 | 16.35 | Pa26 | 671 | 0.0 |
| Rpt5 | Ps27 | 370 | 30 | Pa27 | 672 | 0.0 |
| shrb | Ps28 | 371 | 24.55 | Pa28 | 673 | 42.0 |
| Rab1 | Ps34 | 372 | 0 | Pa34 | 674 | 47.0 |
| Rab5 | Ps35 | 373 | 0 | Pa35 | 675 | 58.9 |
| Arf79F | Ps36 | 374 | 13.3 | Pa36 | 676 | 4.4 |
| Chc | Ps37 | 375 | 0 | Pa37 | 677 | 12.9 |
| alphaCOP | Ps44 | 376 | 0 | Pa44 | 678 | |
| RpL17 | Ps49 | 377 | 0 | Pa49 | 679 | 31.2 |
| RpL36A | Ps52 | 378 | 8.2 | Pa52 | 680 | 63.3 |

TABLE 1c

Pu

| Target | Target | SEQ ID | Survival |
|---|---|---|---|
| gene | ID | NO | % |
| GFP | | | |
| Sec23 | Pu1 | 681 | |
| beta′COP | Pu2 | 682 | |
| betaCOP | Pu3 | 683 | |
| Ubi-p5E | Pu4 | 684 | |
| Prosbeta4 | Pu5 | 685 | 53.9 |
| wupA | Pu6 | 686 | |
| RpL6 | Pu7 | 687 | |
| Prosbeta1 | Pu8 | 688 | 43.3 |
| Tsp2A | Pu9 | 689 | |
| Rpn2 | Pu13 | 690 | |
| RpL40 | Pu25 | 691 | |
| gammaCOP | Pu26 | 692 | |
| Rpt5 | Pu27 | 693 | |
| shrb | Pu28 | 694 | |
| Rab1 | Pu34 | 695 | 46.7 |
| Rab5 | Pu35 | 696 | 23.4 |
| Arf79F | Pu36 | 697 | |
| Chc | Pu37 | 698 | |
| alphaCOP | Pu44 | 699 | |
| RpL17 | Pu49 | 700 | |
| RpL36A | Pu52 | 701 | |

[symbol]

[0252] Table 1a,b,c shows the insecticidal activity of the selected targets for each of the flea beetle insects analyzed. It has previously been suggested that certain genes of a given insect species can be predicted to confer an RNAi-mediated insecticidal effect based on the essential nature of the gene in insect of a different genus. However, empirical evaluation of the target genes revealed that the insecticidal effect could not be predicted (See Baum et al., 2007, Nature Biotechnology 25: 1322-1326; also U.S. Publication No. 2015/0322456). Additionally, it has been suggested that a gene which has been shown to be a useful target for RNAi-mediated insect control for one insect pest is a useful target for RNAi-mediated insect control of a second insect pest of a different genus and/or family. However, empirical evaluation of the target gene in different insect pests of different families show that a given target with very high insecticidal activity in one insect pest may not produce significant mortality or growth inhibition in a second insect pest (Knorr et al, 2018, Scientific Reports 8: 2061, DOI: 10.1038/541598-018-20416-y). Therefore, the insecticidal activity of a dsRNA molecule against a target gene of an insect pest can only be determined empirically.

### Example 3: Dose Response Curves of Selected dsRNA Molecules Against Flea Beetle Species

[0253] This example describes testing dsRNA molecules of the invention for biological activity against flea beetle species in further laboratory bioassays. In other words, dsRNAs based on coding sequences from P. chrysocephala were further tested against P. chrysocephala insects, dsRNAs based on coding sequences from P. nemorum were further tested against P. nemorum insects, dsRNAs based on coding sequences from P. striolata were further tested against P. striolata insects, dsRNAs based on coding sequences from P. armoraciae were tested against P. armoraciae insects, and dsRNAs based on coding sequences from P. cruciferae were tested against P. cruciferae insects.

Dose Response Curves of Selected dsRNA Molecules Against P. chrysocephala

[0254] The dsRNA molecules described above are tested for toxicity against P. chrysocephala in laboratory bioassays in a dilution series including a 2-fold and 10-fold dilution to generate dose response curves (DRC). Bioassays are performed using an RNA-treated artificial diet method. Briefly, synthesized dsRNA molecules are diluted to the appropriate concentration in a sucrose solution. Samples containing dsRNA and sucrose are heated up to 60° C. An agarose solution is heated till boiling and added to the dsRNA dilutions, leading to final concentrations of 5% sucrose and 0.5% agarose. The agarose solution containing the dsRNA is divided over three petri dishes (diameter=3 cm), the final dose being 67 μg, 33 μg or 7 μg of dsRNA per petri dish. Ten to twelve adults are added to each petri dish to have between 30 and 36 adults per treatment. Each petri dish is maintained at approximately 25° C. and 16:8 light:dark photoperiod. Mortality is recorded at different days post-infestation, with percent survival (% survival) calculated on day 12 with an Abbott correction. dsRNA designed to target GFP is used as a negative control.

Dose Response Curves of Selected dsRNA Molecules Against P. nemorum

[0255] The dsRNA molecules described above are tested for toxicity against P. nemorum in laboratory bioassays in a dilution series including a 2-fold and 10-fold dilution to generate dose response curves (DRC). Bioassays are performed using an RNA-treated artificial diet method. Briefly, synthesized dsRNA molecules are diluted to the appropriate concentration in a sucrose solution. Samples containing dsRNA and sucrose are heated up to 60° C. An agarose solution is heated till boiling and added to the dsRNA dilutions, leading to final concentrations of 5% sucrose and 0.5% agarose. The agarose solution containing the dsRNA is divided over three petri dishes (diameter=3 cm), the final dose being 67 μg, 33 μg or 7 μg of dsRNA per petri dish. Ten to twelve adults are added to each petri dish to have between 30 and 36 adults per treatment. Each petri dish is maintained at approximately 25° C. and 16:8 light:dark photoperiod. Mortality is recorded at different days post-infestation, with percent survival (% survival) calculated on day 12 with an Abbott correction. dsRNA designed to target GFP is used as a negative control.

Dose Response Curves of Selected dsRNA Molecules Against P. striolata

[0256] The dsRNA molecules described above are tested for toxicity against P. striolata in laboratory bioassays in a dilution series including a 2-fold and 10-fold dilution to generate dose response curves (DRC). Bioassays are performed using an RNA-treated leaf disc method. Briefly, synthesized dsRNA molecules are diluted to the appropriate concentration and applied to canola leaf discs (5 mm diameter), coating the top surface with a final dose of 20, 10 or 2 ng/mm2. Leaf disks are placed in 20 mL plastic cups with ten beetles per cup. Beetles are fed fresh leaf discs, coated with dsRNA, every second day, for a period of two weeks. The cups are maintained at approximately 25° C. and 16:8 light:dark photoperiod. The number of dead adults is recorded every second day (when fresh leaf discs are provided), with the final survival percentage calculated at 14 days. dsRNA designed to target green fluorescent protein (GFP) is used as a negative control. Results are depicted in Table 2.

[0257] For Table 2, the target gene and ID are named. The “SEQ ID NO.” indicates the RNA sequence of the sense strand of the dsRNA tested. “Survival %” is the final survival percentage calculated, with Abbott correction, for each insect bioassay.

TABLE 2
Dose response activity of dsRNA molecules against P. striolata

| Target | Target | SEQ ID | Survival % | | |
|---|---|---|---|---|---|
| gene | ID | NO. | 20 ng | 10 ng | 2 ng |
| GFP | | | 100 | 100 | 100 |
| Ubi-p5E | Ps4 | 361 | 38.9 | 70.6 | 58.8 |
| Prosbeta4 | Ps5 | 362 | 33.3 | 35.3 | 64.7 |
| Prosbeta1 | Ps8 | 365 | 5.6 | 5.9 | 11.8 |
| Rab1 | Ps34 | 372 | 16.7 | 11.8 | 70.6 |

### Example 4: Testing of Other dsRNA Sub-Fragments of Selected Targets Against Flea Beetle Species

[0258] Testing of Other dsRNA Sub-Fragments of Selected Targets Against P. chrysocephala

[0259] This example describes testing other sub-fragments of dsRNA molecules of the invention for biological activity against P. chrysocephala. These sub-fragments are based on the coding sequence of a selection of positive targets, and are either a shorter length or are based on a different region of the coding sequence compared to the initial dsRNA fragment.

[0260] The dsRNA molecules described below are tested for toxicity against P. chrysocephala in laboratory bioassays. Bioassays are performed using an RNA-treated artificial diet method. Briefly, synthesized dsRNA molecules are diluted to the appropriate concentration in a sucrose solution. Samples containing dsRNA and sucrose are heated up to 60° C. An agarose solution is heated to boiling and added to the dsRNA dilutions, leading to final concentrations of 5% sucrose and 0.5% agarose. The agarose solution containing the dsRNA is divided over three petri dishes (diameter=3 cm), the final dose being 67 μg of dsRNA per petri dish. Ten to twelve adults are added to each petri dish to have between 30 and 36 adults per treatment. Each petri dish is maintained at approximately 25° C. and 16:8 light:dark photoperiod. Mortality is recorded at different days post-infestation, with the final survival percentage calculated at 12 days with Abbott correction. dsRNA designed to target green fluorescent protein (GFP) is used as a negative control.

Testing of Other dsRNA Sub-Fragments of Selected Targets Against P. nemorum

[0261] This example describes testing other sub-fragments of dsRNA molecules of the invention for biological activity against P. nemorum. These sub-fragments are based on the coding sequence of a selection of positive targets, and are either a shorter length or are based on a different region of the coding sequence compared to the initial dsRNA fragment.

[0262] The dsRNA molecules described below are tested for toxicity against P. nemorum in laboratory bioassays. Bioassays are performed using an RNA-treated artificial diet method. Briefly, synthesized dsRNA molecules are diluted to the appropriate concentration in a sucrose solution. Samples containing dsRNA and sucrose are heated up to 60° C. An agarose solution is heated to boiling and added to the dsRNA dilutions, leading to final concentrations of 5% sucrose and 0.5% agarose. The agarose solution containing the dsRNA is divided over three petri dishes (diameter=3 cm), the final dose being 67 μg of dsRNA per petri dish. Ten to twelve adults are added to each petri dish to have between 30 and 36 adults per treatment. Each petri dish is maintained at approximately 25° C. and 16:8 light:dark photoperiod. Mortality is recorded at different days post-infestation, with the final survival percentage calculated at 12 days with Abbott correction. dsRNA designed to target green fluorescent protein (GFP) is used as a negative control.

Testing of Other dsRNA Sub-Fragments of Selected Targets Against P. striolata

[0263] This example describes testing other sub-fragments of dsRNA molecules of the invention for biological activity against P. striolata. These sub-fragments are based on the coding sequence of a selection of positive targets, and are either a shorter length or are based on a different region of the coding sequence compared to the initial dsRNA fragment.

[0264] The dsRNA molecules described below are tested for toxicity against P. striolata in laboratory bioassays. Bioassays are performed using an RNA-treated leaf disc method. Briefly, synthesized dsRNA molecules are diluted to the appropriate concentration and applied to canola leaf discs (5 mm diameter), coating the top surface with a final dose of 20 ng/mm2. Leaf disks are placed in 20 mL plastic cups with ten beetles per cup. Beetles are fed fresh leaf discs, coated with dsRNA, every second day, for a period of two weeks. The cups are maintained at approximately 25° C. and 16:8 light:dark photoperiod. The number of dead adults is recorded every second day (when fresh leaf discs are provided), with the final survival percentage calculated at 14 days with Abbott correction. dsRNA designed to target green fluorescent protein (GFP) is used as a negative control.

### Example 5. Producing Targeted dsRNA Molecules by Bacterial Expression

[0265] This example describes producing dsRNA molecules engineered against identified flea beetle targets using a bacterial expression system.

[0266] A hairpin cassette is engineered for at least one selected flea beetle target (a P. chrysocephala, P. nemorum, P. striolata, P. armoraciae and/or P. crucifera target). The hairpin cassette comprises a T7 promoter operably linked to an antisense sequence of the target, further linked at the 3′end to a nucleic acid sequence which is capable of forming a loop structure, further linked at the 3′end to the corresponding sense sequence of the target, operably linked at the 3′end to a T7 terminator sequence. The hairpin cassette is introduced into bacterial expression vector pGCP295 via BamHI and NotI restriction sites. The vector is then introduced into Escherichia coli strain HT115(DE3)GA01 via electroporation using standard methods, and transformants are selected for using kanamycin selection.

[0267] The bacteria containing the targeted dsRNA expression vector plasmid are grown in defined medium to a specific optical density and induced by addition of IPTG for a specific time period following standard methods and routine optimization. After induction, the bacteria are harvested by centrifugation, and the produced dsRNA molecules are collected.

### Example 6: Activity of dsRNA Molecules in a Spray Application Assay

[0268] This example describes testing of a sub-set of the identified target dsRNAs of the invention for biological activity against flea beetles when applied as a spray. The target dsRNAs may be derived from target genes from P. chrysocephala, P. nemorum, P. striolata, P. armoraciae and/or P. cruciferae. dsRNA molecules are bacterially produced as described above for testing as a spray application on planta. A negative control GFP dsRNA molecule is also produced.

[0269] Three 2-3 week old oil seed rape plants (Brassica napus L.) are sprayed with bacterially produced dsRNA (for example, 200 μg per 3 plants), dissolved in a sucrose solution. 15 insects are put on the plant after spraying, and the infested plant is maintained in a container closed with a mesh. Three days after the initial spraying, the plant is replaced by a second plant sprayed with the same bacterial lysate sucrose solution. Six days after the initial spraying the insects are transferred to an untreated plant. The number of dead adults is recorded every two to three days. Results can be found in Table 3.

[0270] For Table 3, the target gene and ID are named. The “SEQ ID NO.” indicates the RNA sequence of the sense strand of the dsRNA tested. “Survival %” is the final survival percentage calculated, for each insect bioassay.

TABLE 3
Activity of bacterially produced dsRNA molecules
against P. armoraciae in a spray application

| Target | Target | SEQ ID | Survival |
|---|---|---|---|
| gene | ID | NO. | % |
| GFP | | | 100 |
| Sec23 | Pa1 | 658 | 41 |
| Sec23 | Pa1.2 | 659 | 45.6 |
| beta'COP | Pa2 | 660 | 29.8 |
| Ubi-p5E | Pa4 | 662 | 22.8 |
| Ubi-p5E | Pa4.2 | 663 | 44.4 |

### Example 7: Expression of an Interfering RNA Molecule Comprising Target dsRNA in Canola Plants

[0271] This example describes introducing a construct that expresses an interfering RNA molecule into plant cells.

### Vector Construction

[0272] Expression vectors designed to produce hairpin RNAs (hpRNA) consist of a cassette containing a promoter, a sense strand, an intron functioning as a loop sequence, an antisense strand, and terminator. The hpRNA targets at least 21 nucleotides of an endogeneous gene target as described in Table 1. The hpRNA expression cassette is cloned into a binary vector. The binary vector also contains a second expression cassette between the left and right T-DNA borders which designed to express a selectable marker for selection of transgenic cells, tissues, and/or plants following plant transformation. The binary vector also contains selectable markers for selection of the presence of the binary vector bacteria.

Agrobacterium-Mediated Transformation of Brassica napus

[0273] Each resulting plasmid containing the hairpin cassette was transformed into Agrobacterium tumefaciens using standard molecular biology techniques known to those skilled in the art. The vectors described above were transformed into canola.

[0274] Stably transformed Brassica napus cv. ‘Westar’ events are obtained using an adapted published floral dip protocol (Wang et al. 2003). Adult flowering plants are infiltrated twice under vacuum with an Agrobacterium tumefaciens suspension. The strain used is C58C1RifR harbouring the pGV3101 Ti plasmid and a binary vector containing two plant expression cassettes, one for the insect target derived dsRNA which was inserted as a hairpin and an nptII based plant selectable marker.

[0275] After the two infiltrations, performed a week apart, the plants are allowed to mature and set seed. To identify the transformation events, the seed is soaked for 2 days in 300 mg/l kanamycin sulphate solution and then sown out into soil (Li et al. 2010). One week after sowing, the putative positive seedlings are identified due to their healthy green expanded cotyledons versus the smaller, shrunken bleached non-transformed seedlings.

[0276] The transgenic status of the putative events is checked by plus/minus PCR for the presence of the nptII sequence. Positive events are grown up to flowering at which point racemes are removed for insect bioassay.

### Transgenic Canola Feeding Assay

[0277] For the insect feeding bioassay, racemes are removed from the plant when in bud and immediately the cut end is put through the plastic lid of a 20 ml glass vial containing water. Each raceme is infested with 10-15 wild caught P. chrysocephala, P. nemorum, and/or P. striolata adults, and mortality is scored up till day 14 post infestation. The racemes are changed for fresh at day 7.

### Example 8: Interfering RNA Molecules with a Second Insecticidal Agent Bioassays

[0278] Double stranded RNA molecules are produced against a selected target. Additionally, a second insecticidal agent is prepared. Both the RNA and the second insecticidal agent are tested in combination for toxicity against P. chrysocephala, P. nemorum, and/or P. striolata in laboratory bioassays.

[0279] It should be understood that the examples and embodiments described herein are for illustrative purposes only and that various modifications or changes in light thereof of the description will be suggested to persons skilled in the art and are to be included within the spirit and purview of this application and the scope of the appended claims.

[0280] All publications and patent applications mentioned in this specification are indicative of the level of skill of those skilled in the art that this invention pertains. All publications and patent applications are herein incorporated by reference to the same extent as if each individual publication or patent application was specifically and individually indicated to be incorporated by reference.

The application's sequence listing, which the Patent Office published only in electronic form, follows.

SEQUENCE LISTING (743 sequences)

SEQ ID NO: 1 - DNA, 2319 bp, Artificial Sequence
  Psylliodes chrysocephala
atgagcacgtacgaagaatacattcaacaaaatgaagaccgagatggaatcaggtttacttggaatgtatggccatcgagtaggatagaagcaactcgtttggtagtaccattagcgtgtctttatcaaccgattaaagaacgtttagatcttccacccatacagtatgatcccgttctgtgtacaagaaataactgcagagcgattttaaatcctatgtgccaagttgattatcgagcaaaattgtgggtttgcaatttttgttttcaacgcaatccgtttccacctcaatatgcagctatttctgaacagcatcaacctgctgagttaatgcctatgttttcaactattgagtatactattactagagctcagtgtttaccaccgatattcttgtatgttgttgatacctgcatggatgaggaagaattgggttcactaaaagattctttacaaatgtcacttagtttattgcctcccaatgctttaattggtttgattacatttgggaaaatggcccaagttcatgaactaggtactgagggttgcagtaaatcatatgtctttagaggtactaaagatttaacagctaagcaagttcaagagatgttgggtattggtaaagttgctatggggcctcaacaacaaccaggtcaacctagacctggtcaaatgcaacctgcacctatcgcgccaggtagcagattcctacagcctgtatctaaatgcgatatgaatttaactgatttaataggagagcagcaaaaagatccctggcctgttcatcagggaaagagatctcttagatgtaccggtgttgctttatctatagctattggtttattggagagcacttatcccaatacaggagctagggttatgctttttgttgggggaccgtgctctcaagggcctggtcaagttttgaatgatgatttaaaacaacctattagatcgcatcatgatattcaaaaagataatgcaaaatatatgaaaaaaggtataaagcattatgatgctttggctatgagagcagcaactaatgggcattgtgttgatatttattcttgtgctttggatcagactggtttgatggagatgaaacagtgctgcaattctacaggcggtcacatggtaatgggagattcattcaattcctccctattcaaacagacattccaacgggtgttcaccaaagatcaaaagggcgaattaaaaatggctttcaacgggactctggaagtgaaatgttctagagaattgaaagtgcaaggagggattggttcttgcgtatcattgaatgtaaaaggtccgctcgtttcggataccgaaatcggtatgggaaatacggtgcaatggaaaatgtgcactttaactccaagtaccactatagcgctgtttttcgaagtggtcaatcagcattctgcaccgattcctcaaggaggaagaggatgcatacaatttattactcaatatcagcattctaatggccagagaaggatcagagtgagtaccatagctcgcaattgggcggacgcgaccgcgaatattcatcacattagcgctgggttcgatcaagaagcggccgctgtaattatggccaggatggctgtatacagagcggaatcggacgatagtcctgatgttcttagatgggtggacaggatgttgattagattgtgtcaaaaattcggagaatacaacaaggacgacgcgaattcgttcagattgggtcaaaactttagcctctatccccaattcatgtaccatctgagacgttctcaattcctgcaagttttcaataattcaccggacgaaacgtcgtattatcggcacatgttaatgagagaagatctgacgcagtctttgattatgatccagccgattttgtacagttacagcttcaacgggcccccggaacccgttctgttggatacgagttcgattcaatcggagaggatattattgatggacactttcttccaaatattgatattccacggagagacaatagctcagtggcgtaacttgaaataccaagatatgccggaatacgaaaactttagacaactgttacaagcacccgtggacgatgctcaggaaatattgcagacgagatttcccatgccgagatacatcgataccgaacagggcggctctcaagctagatttttactatccaaagtcaatccgagtcaaactcataacaatatgtacgcatacggaggcgacgctggtgcgcccgttttgaccgacgatgtatcccttcaagtgttcatggatcatctaaaaaaattggcggtttcatctacagcttag

SEQ ID NO: 2 - DNA, 2721 bp, Artificial Sequence
  Psylliodes chrysocephala
atgccacttcgtttagacataaaaagaaggctaacagcccgttctgaccgggtaaaatgtgtagacctccatcctacagaaccctggatgctctgctccctttacagcggaaacataaacgtctggaatcatgaaaatcagcaactcgttaaaacttttgaagtatgtgatctgccagtgagagctgcaaaatttgtaccaagaaaaaattggattgtcagtggatctgatgatatgcagataagggtttttaattataataccctagatagagttcatgcctttgaagcgcattctgattatgttagatccattgttgtacatcctacacagccatatattctaacaagtagtgatgatatgcttatcaaattatggaattgggaaaaagcatgggcctgccaacaggtgtttgaaggccacatccattatattatgcaaatttccataaaccctaaagacaacaacacctttgccagtgcttctttagacaggaccataaaagtctggcaattgggtgcttccactgcaaatttcactctcgaaggtcatgaaaaaggagtaaactgtgttgattattaccatggaggtgataaaccatacctaatatctggtgcagatgatagattagtcaaaatttgggattaccagaataaaacttgtgtccaaactttagaaggacatggacaaaacgttactgctgtttgtttccatcctgaactcccaatagctcttactggaagtgaagatggtactatcagagtttggcatgcaaatactcacagattagaaagcagtttgaactatggctttgaaagagtatggactattttctgcttgaagggttccaataatgttgctttaggttatgatgagggtagcattttggtgaaagttggtagagaggaaccagctgttagtatggatgcaagtggtggaaaaattatttgggctagacattcagaattgcagcaggctaacctcaaggctcttccagagggtgctgaaattagggatggtgaacgccttccagtttctgtgaaagatatgggtgcatgtgacatctacccacaaactatccagcacaatccaaatggtcgtttcgtggtagtttgtggagatggagaatacatcatttacacagctatggcattaaggaacaaagcttttggaagtgcccaagagtttgtgtgggctcaagattcaagtgaatatgctatcagggaatctggatctacaattagaatatttaaaaatttcaaagaaaagaagaatttcaaatctgattttggtgctgaaggtatatttggaggctaccttctgggtgtaaaatccgtttctggattgactttctatgattgggaaactttggatttggttagaagaattgaaatacaaccacgggcaatatattggtctgacagtggcaaattagtttgcttggccactgaagatagttattttatactctcatatgattctgatgaagtacaaagggccaaagacaataatcaggttgctgatgatggagttgaatcggcttttaatctcttgggtgaaattaatgagtctgtacgtactggtctatgggtaggagattgtttcatttacacaaattctgtaaaccgtataaattactttgttggaggtgaacttgtaacaatagcccatctagatggaccactttatgttcttggttatgtccctaaagatgacaggctttatttagtagacaaagaactaagagtagttagctaccagctccttctttcagtcttagaatatcaaactgctgtgatgaggagagatttttcaactgctgatagagtcttgccttctattccaaaagagcatagaaccagagtggcacatttcttagaaaagcaaggttttaagcaacaagctttggcagttagttcagatcctgaacatagatttgaactagcagttgcactagaagatctaaacacagccagagccttagctcaggaagctaataaccctcagaaatggagccaacttgccgaacttgcagcttctacgaacaatctagaattagccaaagaatgtatgcagaaggctcaagattacggagggttgcttcttttagctactagctcaggagatgaaaaagtagtaagggcgctaggggatgccactcaaacagaaggcaaacataatctatctttcttgtctcatttcttagttggcgatttaaataaatgtctgaatatattgataacaactggaagacttccagaagcagctttctttgcgaggtcttacttacctgataaaatctcagaagtggtagatctctggagaacacagttgtctactatcaatcagaaagcaggacaaagcttggcagatcctaaagattatgaaaatctgtttcctggtcttcaagaagcaatagtagcacagaaatttttggaacaaaataaccctggatttactccagcaatgttagcaaccagtatcaccccaaatcatgaaagaaacgttatagctgaggtggaagcccagtcgaagaatagtggagtaactgggagttcttctcaatattctgtgaaggcacctattgagcaattgaagaaactctcaattgatcaagatgatgatgacgacgacatagatttagacctggatggtgtgaatatagatgaaaatatagacacaacggatatcaacatagatgacgatttgttgagcgattga

SEQ ID NO: 3 - DNA, 2868 bp, Artificial Sequence
  Psylliodes chrysocephala
atgactgccgttgaacagtcttgttatactttaattaatctaccaactgattcggagccctacaatgaaatgcagctcaaaatggacctcgaaaagggcgaggttaaggtaaaaataagagcacttgaaaggattatacacatgatattagctggagaaagattaccaaacggattcttaatgactattataaggaatgtccttccccttcaggatcatttagctaagaaattacttctaattttttgggaaattgtaccaaaaacttcacctgatggcaaattattacaagaaatgattttagtgtgtgatgcctacagaaaagatctgcaacacccaaacgaatttcttcgaggttctactttaagattcttatgtaaattaaaagaaccagaactgctagaacctctaatggctagtatcagagcctgtttggatcacaggcacagttatgtgcgaagaaatgcagttttggctatttttacaatttatagaaattttgagttcttaattcctgatgcacccgaacttatttctacttatttagatggtgagcaggatatgtcttgcaagagaaatgcttttctgatgcttttacatgctgatcaagatagagcactgtcttatttggcaaattgtctagatcaagttacatcatttggagacattctgcaattggtcattgttgaattaatctataaagtttgccattcaaatcccacagagaggtcaagatttatccgctgcatttacaatctattaaattcaagcagtcctgctgtcagatatgaagctgctggtacacttgtaacactttcaagtgctcccacagcagtaaaagcagctgctagttgttatattgaactaattatcaaggaaagtgataataatgtaaagttgattgtcttggacagattgattgcccttaaggaacatcccagccatgaaagggttttgcaagatttggttatggatatattaagagtgttgcaagctcctgacttggaagttcgcaaaaagactttaaacctagcacttgaactggtatcatctcgtaatatagaagaaatggttttggttcttaaaaaggaggtatcaaaaaccgtagatagcgagcacgaagatacaggaaaatacaggcagttacttgttagaacacttcattcttgttgtataaaattcccagatgtagctgtaactgtcattcctgttttaatggaatttttgtctgatagtaacgagttagctgctactgacgtgttactatttttgagagaggccatacagaagtttgataatctgcaaccacttattattgagaaacttctagaaacattcaaagatataaaatctgttaaagtgcatagagcagctctttggatattgggagaatatgccacttctgtctcagacattgaagctgttattaaagaaattaatcaaaccttaggagaagctcctctgttggaaactgaacaaaaactaatttctggagagacagacgacacaactacagttccaacaggtggagctacaactttggttacttcagatggtacttacgccactcagtctgcctttaattcagtcagtaaatcttcaaaagaaaaacgacctcctctgaggcaatatcttatggatggtgatttttttataggagcgtccttgacttctactctaaccaaattagctttaagatatggtcaaattgcctcagctgctgatagaaataggtttgatgctgaagtcatgcttattatggcaggtatcatacatttaggcaaatcaggtttaccgacaaaaccaataaccaacgatgacaaagaccacatacttttttgcttgcgtgtcatctcagaccgcaccgacccaataatacaaattttctctactctgtgtcgatctgctctcaatgacatgttgatagcgaaggaagcggaagaagccacgactcaaaaatctaaagaacaatccagacacactatccaaacagatgacgctatcagtttccttcaattagaagcggacaagagcggcgaacttggggaaaatgtattcgaaatgtctttatcacaagccttggtcggaggtagaggtggccaaacagactccctaatcagttccaataaattgaacaagataacacagttgactggattttcggatcccgtatattcagaagcttacgtccacgttaatcaatacgatatagttcttgatgttttaatagtgaatcaaacgaacgacactcttcaaaattgcacgctggaactggcgacgctgggcgatttgaaactcgtagaaaaacctcaacctgtcgtactcgcgcctaaagatttttgtaatattaaggcgaacgttaaggtagcttccacagaaaacggcattatatttggtaatattgtttacgacgtcaccggtgccgcttcagatagaaatgtagtggttttaaatgacattcatatcgatattatggattatattgttcccgcgagctgtacagataccgagtttatgaggatgtgggcagaatttgaatgggaaaataaggtcactgtaaatacacctctcacagacctcgccgattaccttgaccatctcttgaaaagtacaaacatgaaatgtctgacttccgaaaaagcccttagcggtcaatgcggatttatggccgccaatatgtatgccaaatctattttcggagaagacgcgcttgcaaatttgagcatagaaaagcctttcaacaaaccagatgcaccagtcgcagggcacatcaggattagagctaaaagtcaaggaatggctttgagtttaggtgataaaataaatatgacacaaaaaggaactcagagtaaagtagctgctgcatga

SEQ ID NO: 4 - DNA, 615 bp, Artificial Sequence
  Psylliodes chrysocephala
ctgcatttagtccttcgtcttagaggtggaatgcagatttttgtcaaaactcttactggtaagactattactttggaagtggaagcctccgatactattgaaaatgtaaaagcaaaaattcaagacaaagaaggaattcccccagatcagcaacgtttgatttttgctggtaagcagttagaagatggccgcaccctgtctgattacaatattcagaaagaatcaactttgcacttagttttacggttgagaggaggaatgcagatttttgtgaagactttaacaggaaagaccatcacattagaagtggaaccatccgattcaattgaaaatgtaaaagccaaaattcaagacaaagaaggaattcccccagaccaacaacgtttaattttcgcaggaaaacaattagaagatggaagaactttgtctgactacaatattcaaaaagaatctacactgcatttagttcttcgtcttagaggtggaatgcagattttcgtcaaaactcttactggtaagaccataactttggaagtggaagcctctgatacaattgaaaatgtaaaagctaaaattcaagacaaagaaggaattcccccagatcagcaacgtttg

SEQ ID NO: 5 - DNA, 603 bp, Artificial Sequence
  Psylliodes chrysocephala
atggagtgcttactaggtattaaatttaacgattttgtactaattgctgccgatatgacggcggcacaaagcgttatcgttatgaaaacagatgaaaataagctgtttaaactttctaacaaactcgtaatggctgtatcaggagaatccggcgatactacacaatttgcagagtatatagctaaaaatattcaattatataaaatgagaaatacatatgaattaagtcctgcagaagcagctgcttttactcgtaggaatctagctgatacactccgaagcaggagtccttaccatgtaaatttacttttggctggatatgatgcaaaggatgggccacaattatattacatggactacttggcttctatagccaaagtggattatgctgctcacggctatggaggcttcttctcactatccataatggatcgcaactatttgaaaaacctctccaaacaacaaggttatgaattattgaaaaaatgtgttaaagaggttcagaagagactgatcatcaatttacctaactttaaggtgcaatgtattgataaagatggcatacaggatatgcctaacattaccccaaaagatttggagtaa

SEQ ID NO: 6 - DNA, 556 bp, Artificial Sequence
  Psylliodes chrysocephala
atggcggacgatgaggaaaagaagaggaaacaggccgaaattgaacgcaaaagggccgaagtcagggctcgtatggaagaggcctctaaagcaaagaaggccaagaaaggtttcatgacacctgagagaaagaagaaacttaggttactgttgagaaagaaagccgctgaagaactaaagaaagaacaagaacgtaaagctgcagaaaggaggcgtatcattgaagaaaggtgtggtaaacccaaattgatcgatgatgccagtgaagcaaaacttaaaacagtttgtaaaacatatcacgaacgaattgacaaactagaagataagaaatttgacctggaaaatgaagtggaattcaaagattttcagatctcggaattaaacagtcaagtaaacgacctcagaggcaaattcgtcaaaccaacattaaagaaggtatccaaatacgaaaacaaattcgccaaattacaaaagaaagccgccgaattcaacttccgtaaccaacttaaagttgttaagaagaaggaattcaccttagaagaagaagataaagaga

SEQ ID NO: 7 - DNA, 768 bp, Artificial Sequence
  Psylliodes chrysocephala
atggccccaacagagaagcagcccgccaagggcaagaaagtaggaaaacccagaaactatgatctaggaaatggcatagttaggttttctcgaaccaagatgtttcataagaaagctttatacaaatttattggtaaaaaagtagccgctgaaaaaaaacctattaagccacgtgttatcgagaaacagatcggtggcgaaaaaaacggtggaaaacgttatgtattggtagaaaagcgtcgggcagtttaccctacacaagacagaatcaagaagcgaccagctaaacagttatttaaggatcatgccagaacattaagagcctcgatcagccctggaacagtacttattcttttggccggttcacataaaggaaagcgtgtcgttttcttaaaacaacttaaatcggggctgctccttgttaccggtccgtttggcattaacgcttgccctctgaggagaatcagtcaaagatatgttattggtacacagacaaaaattgacgttagcggtgttaaattaccggaaaatattaacgatgaatatttcaagagacaaagacagaagcgggcgaaaaaagaagagggagacatttttcaaaccaaaaaacaaggatataaagtcagcgatcaaagaaaaactgaccagaaagaagtcgatactcaagtattagctgcaatcagaaaacaccccgacaggaaagtccttttggcttatttatcagccatgttcggcttgcgatccagtcaatttccacacaggctccag

SEQ ID NO: 8 - DNA, 678 bp, Artificial Sequence
  Psylliodes chrysocephala
atgtcttcaggttttactaattttgctgcacaaaatggtccagacgactggagggatgccgcccacagtactggaacttctataatggcagcagaatttgatggcggtgttgttataggagctgattctcgaacaactacaggggcgtatattgcgaatagagtagcagataaattaacgaaaataactgatcatatttactgttgtcgttctggatctgctgctgacacccaagctattgctgatattgtagcatatcacttaaatttccatggtatggaattgggtgaggaacctcttgtagaagtaggagcagcaatcttcaaggaactttgctacaactacagagattcgttaatggctggaatactcgtagcaggttgggacaagaaaaaaggtggtcaagtctattccatacccattggtggaatgtgcgttagacaagaagtttctattggaggttccggttccagctatgtttatggttatgtagatgctaactttaaacctggaatgtcaaaggaagactgcgttaagtttgtttcaaatactttggctctagcaatgtctagagatggttcatctggaggtgttgtcagaataggaattataactgaaaaaggtatagaacgtagggttattttaggtaatgagttgcccaaattctatgagggttaa

SEQ ID NO: 9 - DNA, 747 bp, Artificial Sequence
  Psylliodes chrysocephala
atggccgggaagggagatggagaaggcgaagggaatattctcaaattagaaaatcagattgccgtcattaaatacgtgatactctttaccaacgtcttgctatgggcccttggcggagcaatttttggtctttgcctttggctaaggttcgaagagggcatccaagaatggcttcagaaattagattccgagcaattttacatcggggtttatgtacttatagtcgcttcagtgatcgtcatgattgtgtcctttctgggatgtattagtgccctgcaggaaagttcgtttgcccttttactgtacattggcagccaagtgctcagttttatattcggtttatccggttcagctgttcttctggataacagcgccagagattcccacttccaacccagaatccgagaaagtatgcgacgtcttatcatgaatgctcatcacgaggcatccaaagaaacacttgccatgattcaggaaaatattggttgctgtggcgctgatggagcaagtgattacttatctctgcaacagccgttgccaactcagtgcagagatacagttacaggtaatccttattaccatggatgtgttaacgaactcacatggttctttgaagagaaatgcggatggattgcaggattagccatgacgatttgttttattgctgttttaaacgtcgttctttcaacagtacttattcaagctctaaagaaagaagaggaacaagccgattcttacagaaaataa

SEQ ID NO: 10 - DNA, 2838 bp, Artificial Sequence
  Psylliodes chrysocephala
atgaatattacttcagctgcggggataatatccctactagaagaaccaagaccagaattgaaagtatttgctctaaaaaaattagattccattgttgatgaattttggccagagatttcagaagctatcgagaaaattgaaattcttcatgaagacaaagtatttcaacagcaccaactggctgcattggtagcaagtaaagtttactaccatttgggagcatttgaagattccttaacatacgctttgggtgctggcgatctttttgatgtaaacgcccgaacagagtatgtggaaacgacacttgccaaatgtattgattattacacacaacatcgcattgctttggctgaaggcgtacgagatgcaaagcccattgatgccagacttgaggccattgttaatcgtatgtttcaacgttgtttagatgacggacaaaaccgacaggccatgggactcgctttggaaactagaagaatggacatttttgaattgtccattacacaagctgatgacattattggtatgctgacctatgcttttcaggtcgctatgagtttgatccaaaaccgtgcattccgaaacaccgtcctgaggtctctagttggtctgtatcggggtctaactactcccgattacgtcaatatgtgccagtgtctaattttcttagacgaccctctcccagtggctgaaatcttagataaactcgtgtctggtaaagaagatactgaactgatggcctaccaaatagcattcgacctatacgagtcagcaactcagcagtttttggagagggtattggtagctcttagagctactgctccgattccgtcgctgctggaagagaaggctaaacccaagattggcgatcaagccagtagcacttcagctgaggcttcgactggcgatgccactgttagtgaatcaaagactgaagttgttaaggaagagaaatctattgatagtttgtctgatcatgaaaaagaacaccagaaacgtatcgaaaagttacacaccattctttcaggcgaagtgtccatcgaacttcatcttcaatttcttatcagatctaatcatgctgatctccttattttgaaacaaacaaaagaaaccgtccgcgttagtatttgtcatactgctaccgttatagctaatgctttcatgcacagcggtaccaccagtgatcaatttttaagagataacttagaatggttagcaagggctacaaattgggccaaactcacggctacggcttctcttggcgtaattcacaggggacacgagcaagaagctttgaccttaatgcagagctacttacctaaagaagtgggacccagttccggatattcggaaggcggcgggctgtacgctctcggtctcatccacgccaaccacggcgcgaatatcatcgattacctactcggtcagctgaaagatgctcagaacgaaatggtcagacacggtggttgtctgggtcttggtttggccgccatgggtacccacaggcacgacgtttatgaacaactcaaattcaatctctatcaagacgacgcgaataccggagaagccgctggtatagccatgggtatggtcatgttgggctccaataattcggcaactataatggatatggtggcgtacgcacaagaaagtcaacatgaaaaaatcctgcgtggattagcagtgggtataagtttcacgatgtatggtcgtctagaagaggccgattcactaatccatcagctgacttcagataaggatccaattttaagacggtccggaatgtataccttagccatggcttactgcggtactggacacaatcaagccatcaggaaattactacacgtagcggtgtcagatgtcaacgatgatgtccgaagagctgcagttacagctcttggtttcttgttattcagaacacccgaacaatgtccaagcgtagtttccctcttagccgaaagttacaatccacacgtgcgctacggagccgccatggctctaggtatcgcatgcgcgggaaccggtctgcgcgaagccatagccttactcgaaccgatggtcatgttcgatcccgttaactttgtgcgacagggcgctctcatcgcttccgccatgatcctcattcaacaaacggaacagacttgtccgaaggtcagttttttcaggcagacgtacgcttcagtcatttccaataagcacgaagacgttatggctaaatttggcgctattttagctcaaggaataatcgatgctggtggcaggaacgtcactttatcattacaatctagaactggtcacactaatatgttggctgtggtgggaacactggtgttcacacaatattggtactggttcccattgtctcattgcttggccttggcctttactcctacgtgtgttattgcgttaaatacacaactaaagatgcctaaattggaattcaagtcgaacgccaagcccagcctttatgcctatccggcgcccatggaggaaaagaaacgcgaagaacgggaaaaagtgacgacagcggtgctgagtatagccgctaggcagcgcaggagagaccacgaaagaaagcatcgcgacgaaaaaatggacgtggacgaagaaaaggacgacaaaaaaaccgaaaaggaagaaaagaaaccggaagaaaaaaaggaagacaagaagcccgaagagaagaaagcggacgacaagaaaccttcaacttcgacggccgatgataaaaaggaaaagaaagacgaaaaggaggagaagaagaaggaacccgaaccgaatttcgaaatcttgcaaaatcctgccaggaccatgaggcagcaattgaaggtgatc

SEQ ID NO: 11 - DNA, 387 bp, Artificial Sequence
  Psylliodes chrysocephala
atgcaaattttcgtgaaaactctcacaggtaaaaccattaccctcgaggtagagccatcagatactatagaaaatgtaaaagcaaagatccaggacaaggaaggtatccctcctgaccagcagcgattaatcttcgctggaaaacaactcgaagatggacgtactctttcagactataatatccagaaagaatccacccttcatttggtgctccgtttgagaggaggtatcatcgagccctctctgcgtctcctagctcagaaatacaactgcgacaagatgatctgtcgcaaatgctatgctaggttacaccctagggctactaattgcaggaaaaccaagtgtggacacacaaacaacttgcgccccaagaagaagctgaagtaa

SEQ ID NO: 12 - DNA, 2640 bp, Artificial Sequence
  Psylliodes chrysocephala
atgagctcttttaaaagagacaaaaaggaagaagaagatggaggtattaatcttttccaaaacattgagaaaacaaccgttttgcaagaagctcgggtttttaatgaaacaagtgtaaatccaagaaaatgtacccctattcttacaaaactactttatcttttgaaccagggtgaaagcctcagtgtcaaagaagctacagatgttttctttgcaatgaccaaattattccaatcgaaagacgtaattttacgaagaatggtctatttgggaataaaagaattgagttctactgccgatgatgtgattatagtcacttctagtcttaccaaggatatgactggaaaagaagatatctaccgagcagccgcaattagggctctttgcagtatcactgatgctacaatgttacaagcaatagaacgatatatgaagcaagctatagtagataggaactcggctgttagttctgctgctcttgtcagttccttgcacatgactagaatggccccagaagtagttaaaagatgggttaatgaggcacaagaagcaattaacagtgacaatgtgatggtacaatatcatgcattaggactactttatcatattagaaagacagatcggttggctgtaacaaaattaatagccagattgactagaatgtctttgaaatctccatatgctgcttgtatgttgatcagaataacagccaaacttcttgaagaagaagattctggaaatgacactccctattttgaattcatagaatcctgtctaaggcacaagtctgaaatggtagtctacgaagcagcccatgcaattgtcaatctcaaacgtaccaccagcagagaattagctccagctgtaagtgttctgcaactattctgtggttctccaaaaccaacactaagatttgctgcagtcagaacattaaatcaagtagctatttctcaccctgcagctgttacagcttgcaatctagatttagaaaacttgattactgattctaacagatcaattgctactttggctataactactctgttaaaaactggtgctgaatcatctgtagaccgtctcatgaaacaaattgcaagtttcgtttctgaaatcagtgatgaattcaaagttgtagttgtccaagccatcaaggcactagctctcaagtttcctcgcaaacatagcacactaatgaatttcctgtcagccatgttaagggatgaaggaggtctggaatataaagcatctattgctgatactatcataactattattgaagacaatccagaagctaaagagtcaggtttggcacatttgtgtgaatttattgaagattgtgaacatgtttctttagctgtaagaattttgcatttgttgggaagagagggtccaaagacaaagcaaccttcaagatacatccgtttcatctacaatcgagttattttggaatgtccatctataagagccgcggcagtgtccgcaatggcgcaattcggcgcttcctgtccagatttgttagaaaacattcaagttttacttgcaagatgtcaaatggattcggatgatgaagttagagacagagccacttattacagcaacattctgagtagaagcgacaagaacctgtacaataattacatcatcgatactttacaagtatccattccatctttggaacgctcactcaaagaatacactcaaaaccaaacaatccaaccttttgacataaaatccgttccactagcagccgttccaacctcggaagaacgcgagaagaagcacaaaaccgaaggtatgctcatatctcaaggcccagtccgcccgccgccggtttccagagaagagaacttcgccgaaaaactggctgccatcccaggcatccaacaacttggacctcttttcagaagctcagaagtcgttgaacttactgaatctgaaactgagtattttgtacgttgtatcaaacactgttttgctcaccatatcgttttacaattcgattgtttgaacactcttgctgatcaactcttggaaaatgttagggtcgatttggaccctaatgaaaactttgaaattttggctgaaataccctgcgaacagttgcattacaaccaaacggggacgacatatgtgatactgaaattccctgatgatgatctaacaagttgtgtgggaacctttggagctgttcttaaatttgttgtcaaggattgtgatcctaccactggaataccagactgcgaagatggttacgaagaagagtacatgcttgaagatcttgaagtaactcttggggatcaaatccaaagggtaggcaaagtcaattgggccgcggcctgggacaaggcagcagaaggctcagtagaaaaagaagatacctattctctcagttcaatgaacactttagatgaggctgtaaagaatattatacaatttcttgggttggcagctgctgaacgaactgatcaggttcccgaaggaaaaagtactcatacattgttactttcaggtgtattcagaggaggtatcgaaattttggttagagcaaaacttgcattagcagatggcgttaccatgcaattaactgtgaggtcacctgacgatagtgtagcagaactcattacttcttctgttggttaa

SEQ ID NO: 13 - DNA, 1284 bp, Artificial Sequence
  Psylliodes chrysocephala
atgtcgactttagaagataaatcgatctgggaagacggcgaagaagcgctaggtgaagaagttctcagaatgtctaccgatgaaatagttagtcgtactcgtttattggacaatgagatcaaaataatgaagagtgaagtaatgagaataaatcacgaattacaagcacagaatgagaagatcaaagagaacacggaaaaaataaaagtaaacaaaacgttgccttatttggtgtctaacgtgatagaactgttagatgtcgatccccaggaagaggaagaagacggtgcagtggtagatttggattctcaaagaaaaggaaaatgtgcagtagttaaaacatcaacccgccaaacttactttctgccagttatagggctggttgatgaggaaaagttgaagcctggtgatttagttggtgtcaacaaagactcttatctcattttggaaacgctgcctgccgagtacgatgccagagttaaagctatggaggtggatgagagacctgctgaacagtactcagatattggaggtttagataaacaaatccaagaactgattgaagctgttgtgttaccaatgacccataaagataaatttgttaatttgggtattcatcccccaaaaggcgttttactatacgggccacctggaactggaaaaaccctccttgccagagcatgtgcagctcaaacaaaatcaaccttcttaaaattagctggcccccaattagtccagatgtttattggtgacggcgccaagcttgtgagagatgcattcgctttagccaaagaaaaatctcccgctatcatatttatcgatgaactggacgcaataggcacaaaaagattcgattctgagaaagcgggtgacagggaagtgcaacgtactatgttggagttgctgaaccagctggatgggttcagttcaaccgccgatatcaaagtgatagctgctaccaatcgtgtcgatattttagaccctgctctgcttcgatctggtagattagacagaaagatagaattcccgcatcccaatgaagaagcgagggctagaatcatgcagattcactccaggaaaatgactgtcaatcctgatgtgaattttgaagaactggctaggtctacagatgactttaatggagcccagtgcaaggctgtgtgtgttgaagctggtatgattgctttgagacgtaacgctaatgccgtcacacatgaagattatatggatgctataatggaagtgcaagccaagaagaaggcaaatcttaattactatgcttag

SEQ ID NO: 14 - DNA, 666 bp, Artificial Sequence
  Psylliodes chrysocephala
atgagctttttcaataaaatattcggagggaaagaaaaagatgaaggtcctaccccaggcgaagctatccagaagcttagagaaactgaagaaatgttatacaaaaaacaggaatttttagaaaagaaaatagaagaatacacattattagctaagaaaaatgcctctaagaataaacgagtggcccttcaagctcttaagaagaagaaaagattggaaaagactcaactgcaaatcgatggaacacttacaactattgaaatgcaaagagaagccctcgaaggagctagtactaacacagcggttttagattctatgaaaaatgctgctgatgcccttaaaaaagcacacaagaacctggatgttgataatgttcatgatataatggatgatatagcggaacaacacgacattgccaatgagatcacaaacgctattagtaatccagttggtttctcagatgatatggatgaagatgaattagaaaaggaactggaggagctcgaacaagaaggtttagaagaagatttactcaaggttcccggacctacagaacttccagccgtgcccgctggagctattgctaagccggcagttgttaaacctgcagctagaaaagtcgaggatgacgatgatatgaaggaattagaagcatgggcatcataa

SEQ ID NO: 15 - DNA, 609 bp, Artificial Sequence
  Psylliodes chrysocephala
atgaatcccgagtatgactacttattcaaacttcttcttattggcgactctggtgtaggaaaatcatgtttattattgagatttgcagatgatacttacacggaaagttatattagtaccattggagtagattttaaaatcagaacaatcgacttagatggaaaaactattaaattgcaaatttgggacactgcagggcaagaaagatttagaaccattacctcgagttactacaggggggcgcacggtatcattgtagtgtacgattgcacggaccaagattcatttaacaacgttaaacaatggctggaagaaatcgaccgttacgcatgcgataacgtaaacaaattacttgtagggaataaaagtgatcttacgactaagaaagttgtcgatttcaacacggccaaggaatacgctgatcagttaggtatcccatttttggagacgtcggcgaagaacgccacgaacgtagagcaggcctttatgacaatggcggccgaaatcaaaaatagagtaggacccccatcatctgccgcagaccaaggaaataaagttaggttcgatcaaagtcgtccagtcgaaactaccaaatctggatgttgctga

SEQ ID NO: 16 - DNA, 651 bp, Artificial Sequence
  Psylliodes chrysocephala
atggcgacaaatagaaccggtactgcccagagaccaaacggcgccacccagggtaagatctgtcagttcaagctcgtcttgctcggcgagagtgctgtcggtaaatcgagcttggtgctgaggttcgtcaaaggacagttccacgaatatcaggaaagcaccatcggagcagctttccttacacaaaccatttgcctggacgatacaactgtcaaatttgaaatatgggatacagcgggacaggaaaggtatcacagtttagcccctatgtactataggggcgcacaggcagctatagtggtctacgatattaccaaccaagacacgttcggcagggcgaagacgtgggtgaaagaacttcagaggcaggccagccccacaatcgtgatagctttggctggcaacaagcaggacttggccaacaagaggatggtggagtatgaagaagcgcagacttacgcggacgaaaacggattgttatttatggaaacctctgcaaagacagcaatgaatgttaacgatatatttttagcaatagctaagaaattgcccaagaatgaacaaaccacgggacaggggggcagcgcccagggcaggcgactggcagaaggcgacgcgggcgccaagacggcaggaaactgctgcaagtga

SEQ ID NO: 17 - DNA, 549 bp, Artificial Sequence
  Psylliodes chrysocephala
atgggtaatgtgtttgcgaatttatttaaaggcctctttggcaaaaaggaaatgaggatattgatggtaggtttagatgctgctggtaaaaccacaattttatataaactaaaattaggagaaattgtaacaactataccaactattggatttaatgtggagactgtagaatataagaatatcagctttacggtgtgggacgtgggtggtcaagataaaattaggcccttgtggagacactattttcaaaatacacaaggcctaatcttcgtagtggacagcaacgatagggagcgtatcaccgaggccaaagacgagctcatgcgcatgctcgccgaagacgagctccgggacgccgtacttctaatattcgccaacaagcaggacctgcctaacgccatgaacgcggccgaaatcaccgacaagctcggtctgcattcgctgcgcaaccgcaattggtacatccaggccacgtgcgccaccagcggagacggtctctacgaaggtctcgattggctgtccaatcagctgaagaacgccaatcgttag

SEQ ID NO: 18 - DNA, 64 bp, Artificial Sequence
  Psylliodes chrysocephala
  misc_feature (4)..(64): n is a, c, g, or t
atgnnnnnnnnnnnnnnnnnnnnnnnnnnnnnnnnnnnnnnnnnnnnnnnnnnnnnnnnnnnnn

SEQ ID NO: 19 - DNA, 3345 bp, Artificial Sequence
  Psylliodes chrysocephala
atgttaacgaaattcgaaaccaaatctgctagggtaaaagggctgtcttttcaccccaaaagaccttggattttggcaagtttgcataacgggtgtatccagttatgggactaccgtatgtgcacccttttggaaaagtttgacgagcatgatggacctgtgagagggatatgttttcatagtcaacaacctctatttgtatcaggtggtgatgattataagataaaggtgtggaactacaagcaaaaacgatgtatttttacgttattgggtcatttagattacattcgtaccacaatgttccatcatgagtatccttggattgtgtctgcatctgatgatcagactataagaatttggaattggcaatcaaggacttgcatttgtgtcctcacaggtcacaatcattatgtcatgtgtgctacattccatccaactgatgatttattagtttctgcttcattggattctacagttagggtctgggatatttcaggtctgcgtaagaagaatgtagctccaggacctgcaggtcttgaagagcatctcaaaaatcctggttcaactgatttatttggacaagctgatgctgtagttaagcatgttttagagggacatgaccgtggtgtaaactgggcttcatttcatcctacacttcctttaatagcctctggggcagacgataggcaaatcaaactgtggagaatgaatgattcgaaagcttgggaggtggatacatgcaggggacattacaataatgtctcttgtgtattattccatcccaggcaagagctgctactatcaaatggtgaagataggagtatcagggtttgggatatggctaaaaggacgtgtttgcatacttttagaagggaacatgaacgtttttgggtcatgaccagtcatcctaatctgaatttattcgctgctggacatgatggtggaatggtcatcttcaagctagaaagagaacgcccagcttatacggtacacggcaacctgctgtactacgtaaaagaacggtttttgagaaaactcgactttaccacgtccaaagacgtgcccgttatgcaaatcaggggcggaggtaaaattccggtatacagaatgtcttttaatcccgcagaaaatgccgttctactttcgacgcgcacttccaatttggataacagcacttacgatctgtacatgattcccaaagatcaagaacgcgaagatcacgttccagaggcagaaagtaagagatcctctggtttgacggctctttgggtggcgagaaaccgtttcgctgtcttagataggacccaccaattgatcatcaagaatttaaagaacgaagtcaccaaaaaggtccaaactcccacgtgcgatgaagttttttatgccggcaccggcatgctactgcttagagattcggaacacgtaacgttgttcgacgtacaacagaaaaggactttggctcaagttaaaataaataaatgcagatacgtggtctggtcatcggatatgtcgcacttggcgcttctctccaaacataatgtgacagtttgtaatagaaaattagacgtcctgtgctctttacacgaaaatactcgagtaaaatcaggagcttgggacgatagcggtgtatttatctatactaccagcaatcacatcaagtatacccttaaaaacggcgatcacggaatcatcagaacactcgatcttcctatatacataactagagtgaggggaagtcaagtgttttgcttggatagggaatgcaagccgcgtctattggtcatcgatccaaccgaatacaaattcaaactggctttaatcaaccacaaatacgaagaagttttgtacatggttagaaattcgcgattggttggtcagagcatcatttcttacttgcaacaaaaaggttatcctgaggtggcgttgcatttcgtcaaagacgacaagacgcgattcacgttggctctggagtgcggcaacatcgagatagctttggaggcggctaaagcgctcaacgataagaattgttgggatcagctggcacaagcagcgctgtggcagggcaatcatcaagtcgtcgaaatgtgctaccaacgcaccaagagtttcgagaaattgtctttcctgtatttgatcaccggcaatttggaaaagttgagaaaaatgatgaaaatcgctgaaattcgcaaggccaggtcgtctcaataccacgctgcgcttttattgggcgatcttgaggaaagagtgaaggtcttgaaggcctcgaaccagctgtctttagcatatttgacagccgccacccatggaatgagagaagaagccgatcagttaaaagaacaaataggagacacgaaaaaggtaccggatgtggatccgaacgccaaattcttgaaccccccaccgccgatacagcaagccgagtccaactggcctttgttgactgttagcaggagcttcttcgaaaacaccgcagcggtagccacagcttcagccaacatgaaatctttaatggccgaaccgatatccgacgtagcaatggaggaagcccaaggttggggcgatgatgacgagctggagctcgatcccgacgagaagaaacccgacactgcggccgccggtggtgacggtgaagctggttgggacgtcgaagacgaaggattggaaatacccgatttaggaccgacggcaacggccgaagtcgagggtaatttcgtccatctacccacaccaggtccgtctccgcctttaacttggactaaaaactctcaactggtggccgatcacgtagcggcaggttctttcgaatcggctgctagattgcttcacgatcagctgggcgtggtggatttcaaacctttcgaaagtctcttcttgaacctctacagcacgtccaagacagtttcttcttggcaacaaaacgtgccgccttcgttcagttatcctttgaggaattggaaggaggcgaatatcaagaatcaattgcctgcttccggggtcaaattgaacgatgtggtcgctaaattgcagatctgttatcaattgacgacgggcggaaagttcacggaggccatcgaaaaactgcaaactctgctgttgtccgtcagccttttggtcgtcgacaacaaacaggagattacggaagcccagcaattgctgagaatagccagcgagtacatttgcggactgcaaatggaaactttgcgcaaaaccatgccgaaaacgtcgcctgaagagcagaaacgtcagtgcgagatggccgcttacttcacgcactgcaaattacagcccatccatcaaatcctgaccctcaggaccgctttgaacatgtttttcaagctcaaaaac

SEQ ID NO: 20 - DNA, 555 bp, Artificial Sequence
  Psylliodes chrysocephala
atgggccggtacgctcgggaacctgagaatgcagcgaaatcttgtaaagctagaggctcaaatttgagagtccactttaagaacacatgtgagacggcaaatgctattagaaaaatgcctctcaaaagggcagtatcgtacttgaagaatgttgttgttcaaaaggaatgtattcctttcagaagattcaatggtggtgtgggtcgttgtgctcaagccaaacagttcggtaccacacagggtaggtggccgaaaaagtctgcagagtttctcttgcaactccttagaaatgcagaaagtaatgctgattacagtggacttgatgtagacaggctagtggtagaacacattcaagtgaatagggctgcttgtctgagacgtcgaacgtacagagcccatggtagaattaacccatacatgtcttctccctgtcatattgaactctggctaactgaaggcgaatctacccctgatcttcccaagaaaaccaataaaaagaagacagcagtggataagaagaggcctaaggcctctgctgctgcagtagcgcattga

SEQ ID NO: 21 - DNA, 315 bp, Artificial Sequence
  Psylliodes chrysocephala
atggttaacgtaccaaaacaacgtcgtacattttgcaaaaaatgtaaagtccacaagacccataaagtaacccaatacaaaaaatcgaaggaacgtcatgcttcccaaggtagaagacgttatgacaggaaacaacaaggttttggtggtcaaacgaaacctattttccgtaaaaaggctaagactaccaaaaagattgtattgaggatggaatgtactgattgcaagttcaggaaacaaattccccttaaaagatgcaaacattttgagctaggaggtgacaagaaacgtaagggacagatgattcagttctaa

SEQ ID NO: 22 - DNA, 1314 bp, Artificial Sequence
  Psylliodes chrysocephala
aagcattatgatactttggcgatgagagcagcgactaatggtcactgcattgatatttattcctgtgcactcgatcaaactgggttaatggaaatgaagcaatgtgctaattctacaggtggtcacatggtgatgggagactcttttaattcatcgctattcaaacaaacattccaacgggtgtttactagagatcagaaaaacgatttgaaaatggcttttaacggaacattagaagtgaaatgttctcgagaattaaaagtgcaaggaggaattggatcctgtgtatcattaaacgttaaaagtcaactggtctccgacacggaaatcggcatgggcaacactgtgcaatggaaaatgtgtacacttaccccgagcactacgatggccttgttcttcgaggtcgtcaatcagcattctgcgccaattccgcagggaggaagaggttgcatacaattcattactcaatatcaacattcaagtggtcaaagacgaattagagtgacgacagtggctcgaaactgggcagatgccactactaatattcaccacatcagcgctggtttcgaccaagaagcagcagcagtaattatggccagaatggcggtttatagagctgaatctgatgagagtcccgacgttctgagatgggtcgatagaatgctgattcgattgtgtcaaaaattcggagagtacaataaagacgatgctggttcattcagattgggtcaaaactttagcctctatccgcaattcatgtatcacctaaggagatctcagttcctgcaagttttcaataattctcccgatgaaacatcgttctatcgacatatgttgatgagagaagatcttactcaatcattgatcatgattcaaccgattttgtacagctacagtttcaacggccctccagagcctgtgctgttagatacgagttccatacagcccgatagaatattgctcatggacacgtttttccaaattttgatattccacggggagactatagctcaatggagaaatttgaaatatcaagacatgcccgaatacgagaactttaggcaattattgcaagcacctgttgatgatgctcaggagatattacaaacaaggttccccatgccgagatatattgacaccgaacaaggggggtctcaggctagatttttattgtccaaagtcaatccgagtcagactcacaataacatgtattcatatggaggggacgccggcgctccagttttaacagacgatgtatcacttcaagtattcatggatcatttgaaaaaattggcagtttcgtctacggcttga

SEQ ID NO: 23 - DNA, 915 bp, Artificial Sequence
  Psylliodes chrysocephala
gacgcgagcggtggaaaaatcatctgggctaggcattccgagctacagcaggccaatttgaaagccttacccgaaggagctgaaataagagacggggaacgtttgccggtgtccatcaaagacatgggcgcttgcgacatttaccctcagactattcagcacaatcccaacgggcgtttcgtggtggtttgcggcgatggggagtacatcatttacaccgcaatggcgctcaggaacaaagcgttcggtagcgcgcaggagttcgtgtgggcgcaggattccagcgaatacgccatcagagagtcggggtctaccatcaggatattcaagaacttcaaagagaagaagaatttcaaatcagactttggagctgaaggcatctatggtggttatctgttgggcgtgaagtctgtatctggcttggctttctacgattgggaaactctggatttggttagaaggatcgaaatacaacctcgttcgatatactggtccgatagcggcaaactagtttgtttggccaccgaggacagttacttcatactatcttatgacgttgaagaagttcagaaagcaagagataacaaccaggtggctgatgatggagtggagtccgccttcaatctcctaggtgaagtaaacgagtcagttcgcacaggtctctgggtaggagattgcttcatttacacgaacgccgtaaaccgtataaattacttcgttggaggtgaattggtgaccatcgcgcatctcgatggcccactgtacgtactaggctacgttccgaaggacgacagactctatttagtcgacaaagaattgagagtggttagctatcagctgctcctttcggtcttggagtaccaaaccgccgttatgagaagagatttctcgacagccgatagagtgttgccttcg

SEQ ID NO: 24 - DNA, 2871 bp, Artificial Sequence
  Psylliodes chrysocephala
atgacggcggtcgagcagccctgttacactttaattaatcttccgaccgattcggagccttacaatgaaatgcaattgaaaatggacctcgaaaagggcgaagtcaaagtaaagataagggctttggaaagaatcatacacatgatattggcaggcgagagattgcccaacggattcctgatgacaatcatacgaaacgttttgcccctacaagatcacctggccaagaaacttttgctcattttttgggaaatcgtgccgaaaaccacccccgacggtaaattactgcaggaaatgatcctagtctgtgacgcctacagaaaggacctgcagcaccccaacgaatttttgaggggctccacattgagattcctatgcaagctgaaggagcccgagctgttggagcctctgatgcccagcattcgaatttgcctcgaacacaggcacagctacgttcgaaggaatgccgttctggccatttttacgatatacaagaatttcgaattcctcattccagacgcccctgaattgatttctacttatctagacggcgagcaagatatgtcttgtaaaagaaacgctttccttatgcttttgcatgccgaccaagatcgagccctcacttacctatccaattgcttagatcaagtggcttcttttggggatattctacagttggttattgttgaattgatatacaaagtgtgccactccaaccccgccgagagatccagattcattcgatgcatatacaatctattaaattcgagcagtcctgctgttcggtacgaggccgccggtactctgattactctgtccagcgctccgacagccatcaaagccgccgctagttgttacatcgaattgatcattaaagagagcgacaacaacgtcaaattgatcgttttggatagattgatcgccttaaaggagcatcccagccacgagagagtcctgcaggatttggttatggatatattgagagttttatcggctcctgatttggaagtgcgaaagaaaacacttaatttagcgctggaattggtgtcctctcgtaacgtcgaagaaatggtgtttgtgctgaagaaagaggtgtctaaaactgtggacagcgaacaagaagacaccgggaaatataggcaattgttggtcagaacattgcactcctgctgcatcaaattccccgatatagctgcaacggtcattcctgttttgatggaattcctgtccgatagcaacgaattagcggccactgatgtgttgctatttttgagggaagccatacagaaattcgataatttagagccgctcattatcgaaaaattattggagacattcaaagacatcaaatctgtgaaagtacatcgagctgctctttggatactgggcgaatacgccacgtcgactggcgacattgaagccgtcatcaaggagatcgttcaaaccttgggcgaatgcccattgttggagactgagcagaagagtatatctggtaacacggatgaaagtgcgccggttcatgcaccagctggggctaccactttggttacttcagatggaacgtacgccactcagtctgctttcaacgtggccagcaaatcgacgaaagagaagagacctccattgaggcaatacctgatggacggagatttcttcattgccgcttctctggcttctactttaaccaaactggctttgaggtatggcgaaaacgtttccgcttccgataggaataaattcgacgccgaagttatgctcattatggctggcattttgcatctaggcaaatcaggtttgcccgtaaaaccgataaccaacgacgacaacgaccacatcctcttctgcctgcgcgtgctatccgatcgaacggaccccgtcatccaagtattctcgagcctctgccgcaacgccctcaacgacatgctgctagccaaggaaaccgaagaggcgaccgatcaaaaatcccgcgaaaaatcccgagccgccgtccaaaccgacgacgccatcaccttcgtgcagctggagtccgatcgaagcggcgagctcggcgaaaacatgtttgaaacctccctctcgcaggccctcatgggcggcaagacggcccaatccgactcgaccatcggctcgagcaaactgaacaagatcgcccagctgacgggcttctcggatcccgtctactccgaagcgtatgtgcacgtcaatcagtacgatatcgtgctcgacgtgctggtggtgaaccaaacgagcgacacgctgcagaactgcacgctcgaattggcgactttgggcgatttgaagctggtggagaagccgcaacccgtcgtgctggcgccgaaggacttttgcaacatcaaggctaacgtgaaggtggcttcgaccgagaacggtatcatattcggtaacattgtgtatgacgtgacgggcgccgcgtcggacaggaacgtcgtcgttttgaacgacattcatatcgacattatggattacattgttccggcgtcgtgcaccgattcggagtttatgaggatgtgggctgaattcgaatgggagaataaggtgaccgtcaatacgccgcttacagatctcaacgagtacctggagcatttgctaaagagtactaacatgaagtgtctgacgtctgagaaggcgctcggagggcaatgcggcttcatggccgccaatatgtacgcaaaatcgatctttggggaagacgccctggcgaatttgagcatcgagaagccgttcaacaagccggacgcgcccgtcgccgggcacattagaattcgtgccaaaagtcagggtatggctttgagtttgggcgacaaaatcaacatgacgcagaaagggacgcaaagtaaggtcgttgccgcgtaa

SEQ ID NO: 25 - DNA, 582 bp, Artificial Sequence
  Psylliodes chrysocephala
caagacaaagagggtattcccccagatcagcaacgtcttatctttgctggaaagcaactggaagatggaagaaccttatctgactacaatattcaaaaagaatctactctacatttggtacttcgtctcagaggagggatgcaaatattcgtgaaaactctcactggtaaaactattactcttgaagttgaaccatctgataccattgagaacgtgaaggccaaaattcaagacaaagagggtattcccccagatcagcaacgtcttatctttgccggaaagcagctggaagatggacgaacattgtccgactacaacattcagaaagaatctactctacacttggtacttcgtctaaggggtggaatgcaaatatttgttaaaactctcactggtaaaactattactctcgaagttgaaccatctgatactattgagaacgtgaaggccaaaatccaagataaagagggaatcccaccagatcagcagcgtctcatctttgccggaaagcaactggaagatggaagaaccttatctgactacaatattcagaaagaatctactctacacttggtacttcgt

SEQ ID NO: 26 - DNA, 603 bp, Artificial Sequence
  Psylliodes chrysocephala
atggagtgcctacttggtattaaattcgacgatttcgttttagttgctgccgatatgactgcggcccaaagcataattgttatgaaaacagacgaaaataagctgttcaaattgtccaacaagcttgttatggctgtatccggagagtctggcgatactacacaatttgccgagtacatagctaagaatattcagctgtacaaaatgagaaatacctacgaacttagcccatcggaagcagcttcgtttactcgtaggaatctcgctgatgctcttagaagcagaagcccttaccacgtaaatttgctgctggctggatacgacgagaaagaaggcccccaattgtactacatggactacttggcgtcgaccatcaaagttaattacgctgctcacggttacggaggcttcttttcgttgtccatcatggatagaaactacagcaaatctctgagtagagaagaaggctatgagttgttgaaaaaatgcgtgagagaagttcaaaagaggttaatcatcaatttgcccaacttcaaggtacagtgtgtcggcaaagatggtataacagatttgcccgatatcaccgccaaggatttggcttaa

SEQ ID NO: 27 - DNA, 597 bp, Artificial Sequence
  Psylliodes chrysocephala
atggcggacgatgaggaaaagaagaggaaacaggctgagatcgagcgcaaaagggctgaggtgagggctcgcatggaagaggcctccaaggcgaagaaggccaagaaaggtttcatgacccctgaaagaaagaagaaacttaggttattgttgagaaagaaagccgccgaggaattgaagaaggaacaggaaaggaaagcggccgagaggagacgcatcatcgaagagcgctgcggaaagcccaaattgatcgatgacgccaatgaagaacaacttaagagtatttccaaaatgtatcacgagagaatttgcaagctggaagaccagaaattcgatttggaatatctagtcaaaaagaaagacatggagatcgcggaattgaacagccaagtgaacgacctcagaggaaaattcgtgaaaccgacgttgaagaaggtgtccaaatacgaaaacaaattcgccaagctgcagaagaaggccgccgaatttaacttccgcaaccaactgaaagtggtcaagaagaaggagttcaccctagaagaagaagacaaagagaccaagaaagcggataaagctgagtggcagacgaagaaatga

SEQ ID NO: 28 - DNA, 795 bp, Artificial Sequence
  Psylliodes chrysocephala
atggtcgataagaagaaggccgaaactgcgcccgcagaggcgcccaaaagggtccacaagcctggaaaacctagaaattatgacttaggaaatggtgttatgaggttttcaagaacaagaatgttccataagaaggctttgtacaaatttattggtaaaaaagttaaggctaccaagaaaccacagaagcctcacgttatcgaaaagccaattaatggagaaaagaacggaggaaagagattcgtcttagtcaagaagcgtagggcttactatcctactcaagacaagattaagccgaggcctgcgaagaagtccttctgccagcacaaacgttcacttagaacaaccataacacccggtactgttcttattttgttggctggttctcacaagggtaagagggttgttttcctgaagcaactgtactctggtcttttacttgttactggtccgttttccattaatgcctgtccattgagacgtattagtcaacgatacgttatcgcaacatccaccaaaatcgatgtaagcggtattaaagttcccgacaactttaatgatgactatttcgcgagaaaacgcgtcaagagggcgaagaaagaggaaggtgacattttccagaccaagaaagtggtttacaaagcaagcgaggaaaggaaaaaggaccagaaggaaatcgactcgcaggtgatggctgcaattaaaaaacaccctgaccgcaaagttctccaagcttatttatcatccatgtggggtttgaggtcgtctcaatatcctcacagaatgaacttttag

SEQ ID NO: 29 - DNA, 504 bp, Artificial Sequence
  Psylliodes chrysocephala
atgccgcctgtaattaccgattttatgcctcaggatggttccaacgattggagagacgccgctcacagcacaggaacatccattatggcatcagaattcgacggcggagtcgtcataggagccgactcacgtacaaccactggggcctatatcgcaaacagggtgtccgacaaactaacgagagttaccgatcacatttactgctgcaggtcaggttccgctgctgatacggaggccatcgcagacatcgtaggctaccatttgaacttccacgggatggagttgggcgaagagccgagcgtagaagtgggagcggccatattcaaggagctgtgctacaactacagggactccttgatggccggcatactggtggccggttgggataagaagaaaggcgggcagatttattcgattccgatcggcgggatgtgcgtgagacaggaggtgtcgatcggtgggtccggttcgagctacgtgtacggttacatggacgccaattac

SEQ ID NO: 30 - DNA, 747 bp, Artificial Sequence
  Psylliodes chrysocephala
atggcagggaaaggagacggcaaaggcgaggcgagtatactcaaattggaaaatcagattgccgtcatcaaatacgtgatactctttaccaacgtcttgcaatgggccctcggcggcgcaatctttgccctttgcctttggatgaggttcgaggagggcatccaagaatggctgcagaaattggattccgaacaattttacaacggagtttatgtacttatagtcgcttcgctgatcgtcatgattgtgtcctttctgggatgtattagtgccctacaggagaatacggtgacccttttggcctacatcggcacgcaagtgctgagcttcatattcggtttagccggttcggctgttcttctggataacagcgccagagattcccacttccagccgaggattcgggagagcatgcgacgtcttatcatgaatgctcatcacgagccatccagagtaacgctcgccatgattcaggaaaatatcggctgctgcggtgctgacggagcagaagattacttgtcgctgcaacagccattaccgagccaatgcagggacaccgtcaccggtaatccctatttccacggatgcgtcgacgagctcacgtggtttttcgaggaaaagtgcgcctggatagccgcattggccatgtgcatttgcttctttaacgtttttagcatcgtgctttccactgtgctcatacaggcgttaaagaaggaggaggagcagtcagaaacttacaggaaatag

SEQ ID NO: 31 - DNA, 3018 bp, Artificial Sequence
  Psylliodes chrysocephala
atgaatattacttcggctgcggggattatatcccttttagaagaaccaagacccgaacttaaagtatttgctttaaggaagttggattccatagttgatgaattctggccagaaatttcagaagctatcgaaaagatagaaattctgcacgaagataaagtattccaacaacatcagttagctgctttggttgccagtaaagtttactatcatctgggggcattcgaagattcactaacatatgctttgggagctggagatctcttcgatgtaaatgctagaacagaatacgtcgagaccacacttgcaaaatgtatcgacttctatacacaacaacgcatagctttggcggaaggttcaaccgatgccaaacctatagattcgagactcgaagcgatcgtaagccgaatgttccaacgttgcctggatgacgggcaataccgccaggctatgggactcgccttggagaccagaagaatggacatctttgaattatcaatcacccaagctgatgacgtcatcagtatgctaacctacgctttccaagtagcgatgagcctgattcagaaccgagcgtttcgcaacaccgttttgagatctttagttggcttgtaccgcggtttgaccaccccggactacgttaacatgtgccaatgtctaatcttcttggacgatcccctatcggtcgctgaaattttagataaattggtatccggtaaagaagagtccgaattgatggcttaccaaatagcgttcgatctctacgaatccgcgacgcaacagtttttggagcgagttttggtcgcactcagggctaccgctcccataccttcgctgttggaggaaaaggtcaaatctaaaaccgccgaacaatccagtagcacctccacagaggctaccaaagagcctgttagcagtgaaattaaaagcgagacgaaagaagaaaaatctttcgaggctttgactgaaagtgaaaaggaacatcaaaagcgaattgagaaattgcataccatcttatcgggcgaagtatcgatagaacttcaccttcaatttctcattcgatccaaccacgccgatcttcttattctgaagcaaacgaaagaaaccgttcgagttagtatttgccacactgctacagtcattgctaacgctttcatgcacagcggtaccaccagcgaccaatttttaagggataatttggaatggctagccagagcaacgaattgggcgaagctaacagcaacagcgtctctgggcgtcatccatcgagggcacgagcaagaggctttgactctcatgcaaagctatttgccgaaggaagttgggccgagttcgggatactccgaaggcggcggtttgtacgctctcggtctcattcacgccaatcacggtgctaacataatcgattaccttcttggtcaactcaaagacgcccagaacgagatggttagacacggcggttgtttgggcctcggtttggctgctatgggctcgcagaggcaggatgtgtacgaacagctcaagttcaatctctatcaggacgacgctaatactggagaggctgccggaatcgcgatgggtatggttatgttgggatccagtaatccaactactattatggatatggtagcgtacgcacaagagagccagcacgaaaaaatccttcgcggcttggctgtcggcataagtttcaccatgtacggtcgattagaagaagctgataccttgatacaacagcttacttccgataaggatcccatcctgagaagatccggcatgtacacattagctatggcttattgcggtacagggcataaccaggcgattaggaaattattacacgttgcggtatctgatgtaaacgatgacgtgagaagggcggcagtcacagcgctcggtttcctgttgttcagaacccccgagcaatgtcccagcgtggtgtcccttttggcggagagctacaacccgcacgtgcgttacggggccgccatggcgctgggcatagcctgcgctggcacaggccttcgcgaggccatcgctctgctcgaacccatggtgatgttcgatccagtcaatttcgtccggcaaggagctctcatcgcctccgccatgatcctcatccagcagaccgagcaaacgtgccccaaggtcagcttcttcaggcagacctactctcaggtcatctccaacaagcacgaagacgtcatggccaagttcggcgccattttagcgcaaggtataatcgatgccggtggcaggaatgtaacgctatcgttgcaatccagaacgggccacaccaacatgctggctgtggttggtacattggtgtttacgcagtactggtactggttccctctgtcgcattgtctggctttggctttcaccccgacgtgcgtgatagcgttgaatgctcagctaaagatgcccaaattggagttcaaatcgaacgcgaagccgagcttgtacgcttacccggcgcccatggaggaaaagaagcgcgaggaaagggagaaagtcaccacggctgtattgagtatcgctgcgaggcagaggaggagggatcacgagaggaagcatcgcgatgagaaaatggatgtggatgaagataaagacgataagaaaacggaaaaggaggaaaaagagaagaaatccgaagacaaaaaagaggagaaaaagtccgatgataaaaaaacggacgagaaaaaagcggcatcgtcaagcgatgacaaaaaagataagaaagacgagaaggaggagaagaaaaaggaacccgagcctaacttcgaaatattgcaaaatcctgccagaaccatgaggcaacaactgaaagtgataacgctcaacgataactcgcaatacgttgcaatgaaggacgtttctatcggaggacttgttatggttcgcaatttgaaacctggtgaagaggaattggtggaacctgtagcagcatttggtccgaagggcgatgatgaaaaggaaccagaaccaccagaaccattcgaatggaccgaggattag

SEQ ID NO: 32 - DNA, 387 bp, Artificial Sequence
  Psylliodes chrysocephala
atgcaaattttcgtaaaaactctcaccggtaaaactattaccctcgaggtagaaccatcagacaccatagaaaatgtcaaggcgaaaatccaagacaaagagggaattcctcctgaccagcagcgattgattttcgcaggtaaacaactcgaagatggccgtaccctttcagattacaacatccaaaaggagtccaccctccacttggtgctgcgtttgagaggaggaatcatcgagccctctctgcgtctgttggcccaaaagtacaattgcgacaagatgatctgccgcaaatgctacgccaggctgcacccgagagctaccaattgcaggaaaaccaagtgtggacacaccaacaacttgcgccccaagaagaagctgaagtag

SEQ ID NO: 33 - DNA, 1821 bp, Artificial Sequence
  Psylliodes chrysocephala
atgagctcttttaaaagagacaaaaaggaggaagaagacggagttggaaacatattccaaaacatcgaaaaaacgactgttctacaagaagctcgagtgttcaacgaaacatccgtaaatccaagaaaatgcaccctaattctcaccaaattactttacctactaaatcagggggaagcattaaacgtaaaagaagccacagatgttttcttcgcaatgaccaaactcttccagtcgaaagacgtaatcctccgaagaatggtgtatctcggaatcaaagagctaagctcgaccgcagatgatgtaatcatagtgacttcgagcctcaccaaagatatgacgggcaaagaagacatttaccgagcagctgctatacgtgctctatgcagcatcaccgacgccaccatgctgcaagccatcgagcgctacatgaagcaggccatcgtcgacagaaattccgctgtcagttcggctgcgttggtcagttccttgcacatgaccaaaatggctcctgaagtggtcaaaagatgggtaaacgaagcacaggaagctattaatagcgataatgtgatggttcaatatcatgccttggggctcctgtatcacatcagaaaaactgataggctggctgttacaaaattaattgctaaactcactagaaccaccttgaaatctccttacgctgtttgcatgctcatcagaataatagccaagctcctggaagaagaagattccggcaatgattttccctacttcgatttcatcgagtcctgtttgaggcacaaatccgagatggtagtttacgaagcagcccacgcgatcgtcaatctcaagcgaacgactagcaaagaattggcgccggctgtgagcgtattacaactgttctgcggctcgccgaaggctactttgagattcgccgccgtcaggactctgaatcaagtggccatatcccatccggccgctgtgaccgcttgcaatttggatttggagaatttgattaccgattctaatcgatcgattgccacgcttgctatcactactttattgaaaactggtgctgaatcgtctgttgatcgactcatgaagcaaatagcgagtttcgtatctgaaataagcgatgaattcaaagttgtggtggtccaagcgatcagagcactggctcttaaattccctcgtaagcacaacactctcatgaacttcttatcggctatgctgagagacgaaggtggtttggaatacaaagcctccattgcagacaccataatcactattatcgaagataatcctgaagctaaggaatcaggtctggctcatctgtgcgagtttattgaagattgcgaacacgtttctctagctgttagaatattgcatctgctaggtagggaaggaccgaaaaccaaacaaccttctaggtacattcgtttcatctacaaccgggtcatcttagagtgcccttccataagagcagcagctgtttcagccatggcccaattcggagcttcttgtccagatttgttagaaaatattcaagtattactagccaggtgccaaatggactcggacgatgaagttagagacagagccacctattacagcagcatattgagcaaaaacgataaaaatttgtacaacaattttatcctagatactttacaggtttctataccatcgctggagcgctcgttgaaagagtacactcagaaccctacgaatcagccattcgatataaaatcagttccactgcaagtgggcccgtctccggacgagcgcgagaagaagcacaagtccgaaggcatgctgacgtcgcaggggcccgtccgc

SEQ ID NO: 34 - DNA, 504 bp, Artificial Sequence
  Psylliodes chrysocephala
gccttggccaaagagaaagcccctgctataatattcatcgacgaattggacgccatcggtacgaagcgattcgactccgagaaagccggcgacagggaagtccaaagaaccatgttggaactgttgaaccaactggacggtttcagctccacttccgacatcaaagtcatagcagctacgaatcgtgtggatattctggatcccgctctgcttcggtctggtcggttggacaggaagatcgaattcccgcatcccaacgaagaggcgagggcgagaatcatgcagattcactccaggaaaatgacggtcaacccggacgtgaacttcgaggaattggctagatctacggacgacttcaacggggctcagtgtaaggctgtgtgcgtcgaagctggtatgatcgctctcagacgtaacgccactgcggtaacgcacgaggactacatggatgctattatggaagttcaagctaagaaaaaggctaatcttaattattacgcctaa

SEQ ID NO: 35 - DNA, 642 bp, Artificial Sequence
  Psylliodes chrysocephala
atgagtttttttagtaaaatattcggagggaaggagaaggatacgggccccacgcccggcgaggctatccaaaagcttagggaaaccgaggaaatgttatataaaaaacaagagtttttagaaaagaaaatagaggaatacacattagtagccaaaaagaatgcatcaaaaaataaaagagttgcgctccaagcgctcaaaaagaaaaaacgactggaaaaaactcaattacaaatcgatggaacactcactaccatcgaaatgcaaagggaggccctcgaaggggccagcaccaacacagccgtcttagactccatgaagaatgctgctgaagccctacagaaagcccacaaaaacttgaatgtcgatgatgtccatgatatcatggatgacatagctgaacagcacgacattgccaacgagatcactactgctattagccagccggttggcttcaacgatgatctagacgaggacgaattagaaagcgaactagagaagctcgaacaagaaggattagaggaagatttactgaaagttcccggccctactgaattaccagctgtacctacaggagctattgctaagccagttaaacctgctgctaaaaaagttgatgaggatgatgacatgaaggaatag

SEQ ID NO: 36 - DNA, 609 bp, Artificial Sequence
  Psylliodes chrysocephala
atgaatcctgagtacgactacttattcaagctgcttctcatcggcgattctggagtaggaaaatcgtgtttgctattgagatttgcggatgatacttatacggagagttatattagtactattggagtagattttaaaatcagaacaatcgatttagatgggaaaacaattaaattgcaaatttgggataccgccggacaggaacgatttagaactataacatcgagttactacaggggcgcgcacggaatcatcgtcgtgtacgattgcacagaccaggactccttcaataacgtgaaacaatggttggaggaaatcgaccgttacgcatgcgacaacgtcaataaattacttgtagggaataaaagcgatcttacgactaagaaagttgtcgatttcaacacggccaaggaatacgcggatcagttgggcataccgttcttggagacatcggcgaagaacgccaccaacgtagagcaggcctttatgacgatggcagcggaaattaaaaatcgattaggaccgccgaccgcggccgctgatcaaggaaacaaagttagattcgatcaaagtcgtcctgtcgaaacgactaaatcgggatgttgctga

SEQ ID NO: 37 - DNA, 369 bp, Artificial Sequence
  Psylliodes chrysocephala
gcgcaggcggctatagtggtgtacgatataaccaatcaggatacgttcggcagagcgaaaacgtgggtgaaggagctccaaaggcaggccagtccgacgattgtgatagccctggccggcaataagcaggatttggccaacaagcggatggtggagtacgaggaggcgcagacctacgccgatgaaaacggtttgctgttcatggaaacatcggcgaaaacggcgatgaacgttaacgatatatttttagcaatagctaagaaactgcccaaaaacgaacaaacatccggtcaggggggcagcgcccaaggcaggcgactggcagaaggggatgcgggcgccaaggccccgggaaactgctgcaagtga

SEQ ID NO: 38 - DNA, 549 bp, Artificial Sequence
  Psylliodes chrysocephala
atgggtaatgtgtttgctaatttatttaaaggcctcttcggcaaaaaggaaatgaggatattgatggtaggtttagatgctgctggtaaaaccacaattttatataaactaaaattaggagaaattgtaacaactatcccaactattggttttaatgtcgagactgtagaatataagaatatcagctttaccgtttgggatgtcggtggtcaagataaaattaggccattgtggagacactatttccaaaatacccagggcctaatcttcgtagtggacagcaacgacagggagcgtatcaccgaggccaaagacgagctgatgcgtatgctggccgaagacgagctcagggacgccgttctcctgatattcgccaacaagcaggatttgccgaacgccatgaacgccgccgaaatcaccgataagctcgggctacattcgttgcgcaaccgtaactggtacatacaggccacgtgcgccaccagcggagatggtctatacgaaggtctggattggttgtccaatcagctgaagaatgccaatcgttag

SEQ ID NO: 39 - DNA, 5055 bp, Artificial Sequence
  Psylliodes chrysocephala
atgacgcagcaactgttaccaatcaagtttcaagaacatttgcagcttaccaatgtgggtatcaatgctgccaacatcacatttgccactctcaccatggagagcgacaaatacatttgcgttagggaaaaggtcggtgaaacatcccatgtggtcatcctcgatatggccgacacggccaacccgatcaggagacccatcacggctgaaagtgcaattatgaacccggcttccaaagtcatcgctctcaaaggcaaagccggcattgaaacgcagaaaaccctccaaattttcaacatagaaatgaaatcgaaaatgaaggcccacacgatgaccgaagacgtgaatttctggaaatggatcagtcccaatacgttagctctcgtcaccgagacttccatctatcattggtcgatggaaggcgattctattccccaaaaaatgttcgacagacattcctctttgaacggttgccagatcatcaactaccgcacggacccgaagcaaaactggctgctgctggtcggcatcagcgcgcagcagtcgcgcgtcgtcggcgccatgcagctgtactcggtcgagcggaagtgctcgcagccgatcgaaggccacgccgcctcgttcgccacgttcaaaatggaaggcaacccggagccgtcgacgctcttctgcttcgccgtcaggacgctgcagggcggcaagctgcacatcatcgaagtgggccagaatcccgccggcaaccagccgtttcctaagaaatctgtggatgttttctttcccccagaggcacagaatgacttcccggtggctatgcaggtttcgaccaagtatgacgttatttacttgatcacgaagtacgggtacattcatatgtatgacatcgagagcggtacttgcatatacatgaaccggatttcgagcgataccatttttgtaacggctcctcacgagtctactggcggtattatcggtgttaacagaagaggacaagttttatcggtgtctgtagacgaggaaaacattattagatacattaatacagtgttgcataacgcagatttagctctacgtttggctactagaaacaacctggccggtgctgaagagctgtttgtcagcaaattccagatgcttttccagaacgggcagtacgcagaagccgccaaagtcgccgccaacgctcctaaaggaatcctcagaacgccagctacaatccaaatgttccagcaagttcctacccaaccgggccaaaacagccccctgctgcaatacttcggtatactcctcgatcaagggcaacttaataggtatgaatcactagaattgtgcaaaccggttttgctgcaaggtcgcaaacagctcctggaaaaatggctgaaagaagagaaactggagtgttcggaggaactgggcgatctggtcaagcaagccgatcccactctggccttgtccgtgtacctcagggccaacgtgccggccaaggtgatccagagcttcgccgaaaccggccagttccaaaagatcgtcctgtacgccaaaaaagtatcctacacgcccgattacgtgttccttttgcggcaagtcatgcgaaccaaccccgatcaaggcgccgcttttgccgggatgttggtggccgacgaggagcctctagccgatatcaatcaaatcgtggatattttcatggagcagaacatggtgcaacagtgcacagcctttctattggatgctttgaagaacaacagacccactgaaggtcacttgcaaacgagattgctggagatgaatttgatgtcagcgcctcaagtagccgatgctattcttggtaacaacatgtttactcactacgatcgagcccatgtagctcagctctgcgagaaagccggtcttttgcaaagagcgctggagcactacacggatttgtacgacatcaaacgagctgtagttcacactcacttgttgccggccgattggttggtgaatttctttggaacgttgagcgtcgaagacagtttggagtgcctcaaggccatgctgaccgccaacatcagacaaaacctgcagatttgcgtgcaaatcgccaccaagtaccacgaacagctcaccaccaaagctctcatcgatctgttcgagagcttcaagagttacgaaggtttgttctatttcctcggctcgatcgttaacttctcccaagaccaggaagtccactttaagtacattcaagccgcttgcaaaacggggcaaatcaaggaggtggaacgcatctgtcgcgaatcgaattgctacaatgccgagcgggtgaagaacttcctgaaggaagccaaactgaccgatcaattgccgcttattatcgtctgcgatcggttcgatttcgtgcacgatttagtgttgtacctctacaggaactccttgcagaaatacattgaaatttacgttcagaaagtcaatcccagtcgcttacctgttgtcgtagggggactattggacgtcgattgttccgaagacattattaaaaatctaattttggtagttagaggacaattctccaccgacgaattggtagaggaagtcgaaaagagaaacagattgaaactgctgttgccttggctggagagccgagtacacgaaggctgcgtggaacccgccactcacaacgccctcgcgaaaatttacatagattccaacaacaacgccgagcggttcctgaaagaaaaccaatggtatgattctcgcgtggtgggtcgctactgcgaaaaacgcgaccctcacctggcttgcgtcgcgtacgaacgaggccaatgcgacagagaattgatcgcggtgtgcaatgaaaactccctgttcaagtccgaagctcgatacttggtgcgcaggcgcgacggcgaattgtgggctgaagtacttcaagaaaccaacccgtacaggcgtcagttgatcgatcaagtagtccaaacggcgcttagcgagactcaggatcccgaagacatttctgtgaccgtgaaagctttcatgacagctgatttaccgaacgaactgatcgagttgctggagaagatcgttttggataactccgtgttctctgagcatagaaaccttcagaatttacttattcttactgctatcaaggctgatgctactagagttatggattacattaaccgtttagacaactacgacgctcccgatatagctaatatagctataaacaaccatttgtacgaagaagctttcgccatcttcaaaaagttcgatgtcaacacgtctgcgatccaagtgctcatcgaacaagtcaacaacctagaccgagcttacgaattcgctgaacgttgtaatgaaccggccgtgtggagccagctggccaaggcccaactcaaccaaggtttggttaaggaagccatcgattcttacatcaaggcggacgatccttctgcttatatcgacgtggtggagaccgcttcgaagaacgacagctgggaggacctggtgcgctacctgcaaatggccaggaagaaggccagagaaagctacatcgaatccgagctgatctactcgtacgccaagaccggccggctggccgatttggaggaattcatcagcggtcccaatcacgccgacatccagaaaatcggcgacagatgttttgacgataaaatgtacgacgctgccaagttgttgtacaacaacgtgtcgaacttcgctcggctggccatcacgttggtgcacctgaaggagttccaaggggccgtggacagcgcccgcaaggcgaacagcaccaggacgtggaaggaggtttgcttcgcttgcgtcgacgccgaggagttccggctggcccaaatgtgcggcatgcacatagtcgtgcacgccgacgaactgcaggacttgataaactattatcaagacagaggttactttgaggagttgattggtctgttggaagccgccttggggttggagagggcccacatggggatgttcaccgaactggctatattgtattcgaaatacaaaccggctaggatgcgcgaacatctcgaattgttctggtcgcgcgttaacatccctaaagtgctcagagcagccgaacaggcgcatctgtgggctgaattggtgttcctgttcgacaaatacgaagagtacgataacgccgtgctggccatgatgacgcatcccaccgaggcgtggcgcgaggggcacttcaaagacatcatcacgaaagtggcgaatatcgaattgtactacaaggcgatccaattttacctggatttcaagccgctgttgttgaacgacctgctgctggtgctggcccctagaatggatcacaccagggccgtggctttcttcaccaaaaccggccacctgcagctggtcaaatcctacctacggtctgtccaaaatttgaacaataaagcgatcaacgaggctctgaattctctgctgatagaggaagaggacttccaggggctcagaacatccatagacgcgttcgataactttgataacataggtttagcccagagattagaaaagcacgaattaaccgaatttagacgcatcgccgcttatctgtataaaggaaacaaccggtggaagcagagcgtggaattgtgcaagaaagacaggctgttcagggacgccatggaatatacttcggaatctagaaaccaagaattggccgaagagttattggcctggttcttggacagaaaggcgtacgattgcttctcggcttgcttataccattgttacgatttgcttcgaccggacgtgattctggagctggcttggaagcacaacataatggactttgcgatgccgttcctgatccaggtgactagggaattgacgacgaaagtcgagaaattggagcaatcggacgctcaaagacaaagcgaggcggccgaggagacgaacaagccgatcatgatgcccgagccgcagcttatgttgactgcgggtcctggcatgggtattccgccgcagcaatatatgcctcagcaaacgtacgcccaagtgggatatgcacctcaaatggcctaccagggttacccgggtatgtaa

SEQ ID NO: 40 - DNA, 2508 bp, Artificial Sequence
  Psylliodes chrysocephala
atgttgaccaagttcgaaaccaaatcagcaagggttaaaggactgtccttccatcccaagaggccatggattttagccagtttgcacaacgggtgcatccaactgtgggattatcgaatgtgcacgctcttggaaaagttcgacgagcacgacggacccgtcagaggcatatgtttccacaaccaacagcccctattcgtctcaggcggcgatgattacaaaataaaagtatggaattacaagcagaaacgctgcattttcactctgctcggccatctggattacatccgtacgaccatgttccaccacgagtacccctggatcgtgtccgcctccgatgaccagaccatcaggatatggaactggcaatccaggacgtgcatttgcgttctaacgggccacaatcactacgttatgtgcgccacttttcatccgagcgaagatttattgttatcagcttcgttggattctactgttagagtttgggatatttcgggactgcgtaagaagaatgtatcacccggtccctcgggcctcgaagatcacctcaagaatcctggtgctactgagctattcggccaagccgatgcagtagtaaagcatgttttggaaggacacgatcgaggagtgaactgggcttcattccatcccttcctacctctaatagcttctggagctgatgataggcaaataaagctgtggaggatgaacgattcgaaagcttgggaagtggatacttgtaggggccattacaacaacgtgtcttgcgtgttgtttcatccgagacaggagctgattctgtctaacggcgaggatcggagcataagggtgtgggatatgtcgaagaggacttgcttgcatacttttagaagggaacacgagagattttgggttatgacgagccacccgaatttgaatttattcgccgctggtcacgacggcggtatggtaatatttaaattggaaagagaacgaccagcttacacagtacacggcaacctactgtattacgttaaggaaaagtacttgagaaaactcgatttcaccacgtccaaggatgtccctgttatccaaatcagaggcggcggtaaaatcccggtatacagaatgtcctttaatcctgccgaaaacgccgttctgctatccactcgtacttccaatctggataacagcacttacgatttgtacatgattcccaaggatcaggaaagggacgatcacgtgcctgaagccgaaagcaagagatcttcgggtctaaccgccttgtgggtggccagaaatcggtttgctgtgctcgacagaacccaccaattgatcatcaaaaatctgaaaaacgaagtaacgaaaaaagtccaaacacccacctgtgatgaagtattttacgctggaaccggcatgttgctgttgagggactcagaacacgttactttgtttgatgtccagcagaagaggactttggctcaagtgaaaattagcaaatgcagatacgtcgtgtggtcttcggatatgtcgcatctagcgcttctatccaaacataatgtgacgatttgcaatagaaaattggatgttctgtgttcgttgcacgagaatactagggttaaatctggtgcttgggatgatagtggagtcttcatttatactactagtaatcatattaaatacacattgaaaaatggtgatcatggaataattagaaccctggatcttcccatctacattaccagagtaaaaggtagtcaggtgttctgtttggacagggaatgcaagccccgcctgttggtgatcgatcccaccgaatacaaattcaaactcgctttgatcaatcacaagtacgaagaagtcttgtacatggtcagaaattctcgattggtaggccaaagtattatatcctacttgcaacaaaaaggatatccagaagtagccctgcattttgtgaaggatgacaaaaccaggtttgctctggctttggagtgcggcaacatcgaaatcgccttggaagctgctaaagctctaaacgataaaaattgttgggaccaattggcacaagccgctttatggcaaggcaatcaccaaatcgtggaaatgtgctaccaacgcaccaaaagcttcgagaaactatccttcctctacctgatcaccggcaacttggagaagctgaggaaaatgatgaaaatcgccgaaatccgaaaagccagatcgtcccaataccacgccgctctgctgctgggcgatctcgaagagcgcgtgaaactgctcaaagcctccaaccaactatccctggcttatttgaccgccgccacgcacggcatgcgagaggaggccgagcagctcaaagaacaaatcggcgacgataagaaactgccagacgtcgatcccaaggccaagttcctgaaacccccgccgcccattcaacaagccgaatccaattggcctctgctcacagtcagcaggagtttcttcgaaaacaccgccgccgccgcgaccgcttcggccaacatgaaatccctc

SEQ ID NO: 41 - DNA, 552 bp, Artificial Sequence
  Psylliodes chrysocephala
atgggccgatacgctcgcgaacccgacaatgcggcgaagtcttgcaaagccagaggctccaaccttcgagtccacttcaagaatacctgcgagaccgcgaacgccataaggaagatgcccctcaaaagggccgtagcctacctgaagaacgtagtcgtgcaaaaagagtgtattccatttaggagatttaacggaggagtcggccgttgtgcccaagccaagcaattcggcacgacgcagggtagatggcccaagaagtccgcggaatttctactacagctcctcaggaacgccgaaagcaacgcagattacagcgggcttgatgtcgataggctagtcgtagaacacattcaagttaacagggctgcttgcttgagacgtcgtacatacagggctcacggtagaatcaatccgtacatgtcttctccctgtcacatcgagctttggttaaccgagggagaatcatcacctgaagctcctaagaagagcaacaaaaagaaggcaacggagaagaagagacccaagtcatccgttgctgcagtagcgcattga

SEQ ID NO: 42 - DNA, 315 bp, Artificial Sequence
  Psylliodes chrysocephala
atggtgaacgttccgaaacaaaggcgtaccttttgcaagaaatgcaaagtccacaagctgcacaaagtgacgcagtacaagaaatccaaagaacgtcacgcttcgcagggtagaaggcgttatgacaggaaacagcagggtttcggtggtcaaactaaacccattttcaggaagaaggcaaaaaccaccaagaaaatcgtgttgaggatggagtgtgccgattgcaagtacaggatgcagttcccgttgaagagatgcaagcacttcgaacttggaggtgacaagaagcgcaagggccagatgatccagttctag

SEQ ID NO: 43 - DNA, 2331 bp, Artificial Sequence
  Psylliodes chrysocephala
atgactacttacgaggaatatatccagcaaaatgaggaccgagatggtatccgttttacgtggaacgtgtggccttccagtaggatcgaagccactcgcttggtggtaccattagcctgtctgtatcagcctctcaaagaaagagtagatcttcctcccattcaatatgatcctgtattgtgcacaagaaacaactgcagggctattttaaatccactgtgtcaagtcgactatcgagctaaattatgggtttgcaacttctgcttccaaagaaatccatttcctcaacaatatgcagctatctccgaacaacatcaacctgctgaattaatgcctatgttctcgactctcgagtacacgattaacagagttcaatgtctgcctcccatattcttgtatgttgtggatacttgcatggatgaggaagaattgggttcgctgaaggactccttgcaaatgtcgttgagtttgttacctcaaaacgctttgattggcctgattacatttggaaaaatggttcaagttcacgaattaggcaccgaaggtgtcagcaaatcttacgtgttccgaggcactaaagatcttacggctaaacaggttcaggaaatgttgggtatcggtaaagtcgcaatgactcaacaacaacaacctcaacaaccggggcaacctatgagacctggacaacctcaatctgcacctgtcccgcctggtagcagattcctgcaacctatttctaaatgtgatatgaatctaacagatttaattggagaacaacagaaagatccttggcctgtacatcaaggtaaaaggccactaagatgcactggtgttgcattatcgattgctatcggtttattggagtgcacttatgcaaatacaggggctagggttatgctttttgttggtggctcttgttcacaaggtccaggtcaagttttgaacgacgatttgaaacaacctattaggtcccatcatgatattcaaaaggataatgcaaaatatatgaaaaaagccattaagcattacgatactttagcgatgagagcagcgactaatggtcactgcatcgatatttattcctgcgcactcgatcaaactggtttaatggaaatgaagcaatgcgctaattctacaggtggtcacatggtgatgggagactcgtttaattcatcgctatttaaacaaacattccaaagggtgttcactcgagatcagaaaaacgaattgaaaatggcgtttaacggaacattagaagtgaaatgttccagagaattaaaagtacaaggagggatcggatcctgtgtatcactaaacgttaaaagtcaactggtctccgacacggaaatcggaatgggcaacactgtgcaatggaaaatgtgcacacttactccaagcactacgatggccttgttcttcgaagtcgtcaatcagcattctgcaccaattccgcaaggaggaagaggttgcatacaattcattacgcaatatcaacactcgagtggtcaaagaagaattagagtgacaacggtggctcgaaactgggccgatgccactactaatattcaccacatcagcgctggttttgatcaagaagcagcagctgtaattatggccagaatggctgtttatagagctgaatctgatgagagtcccgacgttctgagatgggtcgatagaatgctgattcgattgtgtcaaaaattcggagaatacaataaagacgatgccggttcattcaggttgggccaaaacttcagcctctatccgcaattcatgtatcacctaaggagatctcagttcctgcaagttttcaataattctcctgatgaaacatccttctatcggcatatgttgatgagagaagatcttactcaatcactgatcatgattcaaccaattttgtacagttacagtttcaacggcccccctgagcctgtactattagatacgagttccatacagcccgatagaatattgcttatggacacgtttttccaaattttgatattccacggggagactatagctcaatggaggaatttgaaatatcaagacatgcccgaatacgagaactttaggcaattgttgcaagctcctattgatgatgcacaagagatattacaaacaaggttccccatgccgagatatatcgacaccgaacaagggggatcccaggctagatttttattgtccaaagtcaatccgagtcagactcacaataacatgtactcatatggaggggatgccggcgctccggttttaacagacgatgtatcacttcaagtatttatggatcatttgaaaaaattggcagtttcgtccacggcttaa

SEQ ID NO: 44 - DNA, 2718 bp, Artificial Sequence
  Psylliodes chrysocephala
atgccacttcggttagacattaaaagaaagctaacagcccgttctgaccgggtgaaatgcgtcgacctccatcccacggagccctggatgctctgctcgctttacagcggaaacataaacgtgtggaatcacgaaaatcagcagctcgtcaaaacgttcgaggtatgcgatctgccagtgagagctgcgaaattcgttccgaggaaaaattggatcgttagtggatctgatgacatgcaaataagagttttcaattacaatacgttggatcgcgtgcacgccttcgaagctcattctgattatgttcgatccattgtggttcatcctacacagccttatattttaaccagtagcgatgacatgctaataaagctgtggaactgggagaaagcatgggcgtgccagcaagtgttcgaaggccacgtgcactacatcatgcagatttccatcaaccccaaagacaacaacacattcgccagcgcctcgttggaccgcacgataaaagtctggcaattgggcgcctccacggccaatttcacgctcgagggccacgagaagggcgtcaattgcgtcgattactaccacggcggcgacaagccctacctcatatcgggcgccgacgatcgactggtcaaaatctgggactaccagaacaaaacgtgcgttcaaacgttggaaggacacggccagaacgtcaccgccgtttgtttccatccggaattgccgatcgccctcaccggcagcgaagacggcacggtcagagtgtggcacgccaacacgcaccgattagagagcagtttgaactacggcttcgaacgggtgtgggccattttctgcctgaaaggctccaataacgtggcgctcggctacgacgaaggtagcatcctcgttaaggtcggtagagaagaacccgccgttagcatggacgccagcggcggcaaaatcatctgggctaggcattcggagttgcagcaggccaatctgaaagccttacccgaagggggcgaaataagagacggcgagcgtttgccggtgtccatcaaagacatgggcgcctgcgacatttaccctcagaccattcagcacaatcccaacgggcgtttcgtggtggtttgcggcgacggggagtacatcatttacacggccatggcgctcaggaacaaagcgttcggtagcgcgcaagagttcgtttgggcgcaggattccagcgagtacgccatcagagagtcgggatccaccatcagaatattcaagaacttcaaggagaagaagaatttcaaatcggactttggagccgaaggcatctacggtggttatctgttgggcgtgaagtctgtatccggattggcgttctacgattgggaaactctggatttggttaggaggatcgaaatacaacctcgctcgatatactggtctgatagcggtaaactggtttgtttggccaccgaggacagttatttcatcctatcttacgatgtcgaagaagttcaaaaagcaagggataacaaccaggtggctgatgatggagtggaatccgcgttcaatctcctaggcgaagtgaacgagtccgttcgaacgggtctttgggtaggagattgcttcatttacacgaacgctgtaaaccgcatcaactacttcgtcggaggtgaattggtgaccatcgcgcatctggatgggccgttgtacgtgctgggctacgttcccaaagacgatagactctatttagtcgacaaagaattgagagtggtcagctatcagttgctcctttcggtcttggagtaccaaacagccgtaatgagaagagatttctcgacggccgacagagtgttgccttcgattcccaaggagcacagaacgagagtggcgcatttcctggagaagcaaggtttcaaacagcaggctcttgctgtgagcaccgatcctgaacacaggttcgagctggctgtcgctttggaggatttaaataccgccaagatgctggcccaggaggccaacaatccgcagaaatggagccagctggccgatttggcggcgtccacgaataacctcgtattggccaaggagtgcatgcagaaagcccaagattacggcggtctattactcttagctaccagttctggagacgacgaggtagtgaggacgttaggcgaagccaccgaggccgagggcaagcataacttggcgtttttatcgcacttattagtcggggatttgaacaaatgtttggatattttgataagcaccggtaggctccccgaagctgcgtttttcgcacggtcgtatctgcccgataaaatatccgaagtggtggaactttggagggcgcagttgtcgattaccaatcagaaagccggtcaaagtttggcggatcctaaagactacgataatctctttcccggtctccaggaagcaatcgtggcgcagaaatatttggaacagaacaactccggattcataccggccgctgcagctgccacggttactccgaatcacgaaagaaacgtaatagcagaagtggaggcgaaggtaaaaggtggagctggtgtgatgccgagcacttcgcatccttcggttacgttgccgagtgaacagatggagaaactctcgattactcaagatgatgacgatttggatttggaccttgatggagtgaacattgatgaaaatatagatacaacggatatcaatatagatgatgacttgttaagtgattga

SEQ ID NO: 45 - DNA, 2871 bp, Artificial Sequence
  Psylliodes chrysocephala
atgacggcggtcgaacagccctgctacactttaatcaatttgccgaccgattcggagccttacaatgaaatgcaattgaaaatggatctcgaaaagggcgaaatcaaagtaaagataagggctttggaaagaatcatacacatgatactggctggcgagaggttaccaaatgggttcctcatgacaatcatacgaaacgttctgcccctacaagatcaccttgccaagaagctgttgctcattttttgggaaatcgtgccgaaaaccacccccgatggcaaattactgcaggaaatgatcctggtgtgcgacgcctacagaaaggacctgcagcaccccaacgaattcttgcgagggtctacattgagattcctgtgcaagctaaaggagcccgagctgttggagcctctgatgcccagcatacgaatttgcctggaacacagacacagctacgttcgcaggaatgccgttctggccatttttacgatatacaagaatttcgaatttctcattcccgacgcccctgaattgatttctacttacctagatggcgaacaagacatgtcttgtaaaaggaacgcttttcttatgctcttgcacgccgatcaagatcgagccctcacttatctatccaattgtttagatcaagtcgcttccttcggggatatccttcagttggttatcgtcgaattgatatacaaggtgtgccactctaaccccaccgagagatccagattcattcgatgcatatacaatctgttaaattcgagcagtcctgctgttagatacgaagcggcaggtactctcattactttgtccagcgctccgactgctataaaagccgccgccagttgttacatcgaattgatcattaaagagagcgacaacaacgtcaaattgatcgttttggatagattgatcgcgttgaaggaacatccgagccacgagagagtcctacaggacttggttatggatatattgagagtgttatcggctcccgatttggaggtgcgaaagaaaacgcttaatttagcgctcgaattggtgtcctctcgtaacgtcgaagaaatggtgtttgtgctgaagaaggaggtgtcgaagaccatggatagcgaacacgaagataccgggaaatacaggcaactgttggtcagaacgttgcattcttgttgcatcaaattccccgatatagctgctacggtcattcccgttctaatggagttcctgtccgatagcaacgaattggcggccaccgatgtgttgctatttctgagggaagccatacagaaattcgataatttggagccgctcattatcgagaaattattggagacattcaaagacatcaaatcggtgaaagttcatcgagccgctctttggatattgggcgaatacgccacgtcgactggcgacatcgaagccgtcatcaaagagatcgttcacacgttaggcgaatgcccattgttggagaccgagcaaaagattatatctggtagtactgaggaaagcgctccggttcatgcacctgccggagcaaccactttggttacctcagatggaacctacgccactcaatctgccttcaacgtggccagcaaatcgaccaaagagaagagacctccgttgaggcagtacttaatggacggagatttcttcatcgccgcttctctggcttctactttgaccaaattggctttgaggtacggcgaaaacgcttcaccttccgataggaacaaattcgacgccgaagttatgctcatcatggccggaattctgcacctaggcaaatcaggtttgccggtaaaaccgataactaacgacgacaacgaccatattctcttctgcctgcgcgtgctgtccgatcgcacggagcccgtggtgcaagtgttctcgaggctctgccgcaacgcgctcaacgacatgctgctggcgaaggagaccgaagaggcgaccgatcagaaatcgcgcgagaaatcccgagcggccgtccagaccgacgacgccatcaccttcgtgcaattggagtccgatcgaagcggcgagctcggcgagaacgtgttcgaaacctccctgtcgcaagcgctgatgggcggcaaaacgggccaatccgattcgagcgtaggatcgagtaaactgaataaaatcgcccagctgacgggtttctcggatcccgtttactccgaagcgtacgtgcacgttaatcagtacgatatcgtgctcgatgtgctggtggtgaaccagacgagcgatacgctgcagaattgcacgttggaattggcgacgctgggcgatttgaagttggtggagaagccgcagcccgtcgtactggcgccgaaggacttctgcaatattaaagctaacgtgaaggtggcttcgaccgagaatggtattatattcggtaacatcgtgtacgatgtaaccggagccgcttccgacaggaacgttgtcgttttgaacgacatacacatcgatataatggattacattgttccggcatcttgcaccgattcggagtttatgaggatgtgggctgaattcgagtgggagaataaggtgaccgtcaatacgccgttgacggatctcaacgagtacctggagcatctgctgaagagtactaacatgaagtgcctgacgtcggagaaggcgctgggcgggcaatgcggtttcatggcggctaatatgtacgcgaaatcgatctttggagaggacgccctggcgaatttgagcatcgaaaagccgtttaataagccggacgcgcccgtcgccggtcacattagaattcgggccaaaagtcagggtatggctttgagtttgggcgacaagatcaacatgacgcagaaagggacgcaaagcaaggtggtcgccgcgtaa

SEQ ID NO: 46 - DNA, 749 bp, Artificial Sequence
  Psylliodes chrysocephala
ccggaaaacaactggaagatggtcgcactctttctgattacaacatccagaaagaatctactcttcacttggttttgagacttcgtggtggaatgcagatctttgtaaaaactttaactggaaagaccatcaccttggaagtcgagccatccgacaccattgagaatgtaaaagctaaaatccaggacaaggaaggtatcccaccagaccagcagagattgatcttcgcaggaaaacaactagaagatggtcgtactctttctgattacaacatccaaaaggaatctactcttcacttggtacttagacttcgtggtggaatgcaaatcttcgttaaaactcttactggaaagaccatcactcttgaagttgaaccttctgacactattgagaatgtcaaagccaagatccaggacaaggagggaattcccccagaccaacaacgtttgatcttcgccggtaaacaattagaagatggccgtactctttctgattacaacatccaaaaggaatctactctccacttggtacttagacttcgtggaggaatgcaaatcttcgttaaaactttaactggaaaaactatcaccttggaagtcgagccatccgacaccattgagaatgtcaaagctaaaatccaggacaaggaaggtatcccaccagaccaacaacgtttgatcttcgctggaaaacaactagaagatggtcgtactctttctgactacaacatccagaaggaatctactctt

SEQ ID NO: 47 - DNA, 603 bp, Artificial Sequence
  Psylliodes chrysocephala
atggaatgtttacttggtattaaattcgacgatttcgttttagttgctgccgatatgactgcggcccaaagcataattgttatgaaaacagacgaaaataagctgttcaaattgtccaacaagcttgttatggctgtatccggcgagtctggtgatactacccaatttgcggagtacatcgccaagaatattcagttgtataaaatgagaaacacctacgaacttagcccatcagaggcggcttcgttcactcgtaggaatctcgccgatgcccttagaagcagaagtccttatcacgtaaatttgctactggctggatacgacgagaaagaaggccctcaattatactacatggactacttggcgtcgaccatcaaagttaattacgctgctcacggttacggaggcttcttctcgttgtctatcatggatagaaactacagcaaatctctaagcagagaagaaggttacgagttgctaaaaaaatgcgtgaaagaagttcagaaaagattaatcatcaatttacctaactttaaggtacagtgcgtcggcaaagatggtatcacagatttgcccgacatcacccccaaggatttggcttaa

SEQ ID NO: 48 - DNA, 612 bp, Artificial Sequence
  Psylliodes chrysocephala
atggcggacgatgagaaaaagaaactggaggaggaaaagaagagaaaacaggctgagatcgaacgcaagagggctgaggtgagggctcgcatggaagaggcctccaaggcgaagaaggccaagaaaggtttcatgacccccgaaagaaagaagaaacttaggttactgttgagaaagaaagccgccgaggaactgaagaaggagcaggaaaggaaagcggccgaaaggagacgcatcatcgaagagcgctgcggaaagcccaaactgatcgatgacgccaatgaaggccaacttaagaagatttgcaaagactattatgaccgcatgtatatatgtgaggagcagaaatgggatttggaacgcgaagttcgaaaacgggactgggagatctcggaattgaacagtcaagtgaacgacctcagaggaaaattcgtgaaaccgacgttgaagaaggtgtccaaatacgaaaacaaattcgccaagttgcagaagaaggccgccgaatttaacttccgcaaccaactcaaagtggtcaagaagaaggagttcaccttagaagaagaagacaaagagaccaagaaagcggataaagctgagtggcagacgaagaaa

SEQ ID NO: 49 - DNA, 795 bp, Artificial Sequence
  Psylliodes chrysocephala
atggtcgagaagaagaaggccgaaactgcgcccgcagaggcgcccaaaaaggtccacaagcctggaaaacctagaaattatgatttaggaaatggcgttatgaggttttcaagaaccaagatgttccacaagaaggctttatataaatttattggtaaaaaagttaaggctaccaagaaaccacagaagcctcacgttatcgaaaagccaattaacggagaaaagaacggaggaaagagattcgtcttagtcaagaaacgtagggcttactatcctactcaagacaagattaagccgaggcctgcgaagaaatccttctgccagcacaaacgttcgctcagaactaccataacacccggtactgttctaattttgttggccggttcccacaagggtaagagggtcgttttccttaaacaactgtactctggccttctactcgtaactggaccgttttccattaatgcctgtccgttgagacgtgttagccaacgatacgttatcgctacatctaccaaaatcgatgttagcggtattaaagttcccgacacctttaacgacgactatttcgcgaggaaacgcgtcaagagggcgaagaaggaagaaggtgacattttccaaaccaagaaagaggtttacaaagtaagtgaggaaaggaaaaaggaccagacggaaatcgacacgcaggtgatggctgcgatcaaaaaacaccctgaccgtaaagttctccaagcttatttatcagctatgtggggtttgaggtcttctcaatatcctcacagaatgaacttttag

SEQ ID NO: 50 - DNA, 678 bp, Artificial Sequence
  Psylliodes chrysocephala
atgccgcctgtaaacaccgattttatgccacaagatggttcgaatgattggagggacgctgctcacagtacaggaacttccattatggcatctgaattcgacggtggggttgtcattggagccgattcacgtacaaccacaggggcttacatcgcaaacagggtgtccgataaactaacgagagtaaccgatcacatttactgctgccggtccggttcagctgctgatacagaggccatcgccgacatcgtaggctaccatttgaacttccacgggatggaactgggcgaagagccgagcgtggaagtgggagcggccatattcaaggagctgtgttacaactacagggactccttgatggccgggatactcgtggccggctgggataagaagaaagggggccagatatattcgataccgatcggggggatgtgcgtgagacaggaggtgtctatcggtgggtccggttcgagctacgtgtacggttacatggacgccaattacaagccgaaaatgtctaaagaggattgcgttaaattcgtaactaatactttggctcttgcgatgtctagagatggttcatctggtggtgtaatcagattagggatcattacggaggaaggtatagaacgtagggttgtattaggtaatgaattgcctaaattttacgagggctaa

SEQ ID NO: 51 - DNA, 747 bp, Artificial Sequence
  Psylliodes chrysocephala
atggcagggaaaggagacggcaaaggcgaggcgagcatactcaaattggaaaatcagattgccgtcatcaaatacgtgatactcttcgccaacgtcttgcaatgggccctcgccggcgcaatctttgccctttgcctttggctgaggttcgaggagggcatccaagaatggctgcagaaattggattccgaacaattttacaacggagtttatgtacttatagtcgcttcgctgatcgtcatgattgtgtcctttctgggatgtattagtgccctgcaggagaatacggtgacccttttggcctacatcggcacgcaagtgctgagcttcatattcggtttagccgggtcggctgttcttctggataacagcgccagagattcccacttccagccgaggattcgggagagcatgcgacgtcttatcatgaatgctcatcacgagccatccagagtaacgctcgccatgattcaggaaaatatcggctgctgcggtgctgacggagcagatgattacttggcgctgcaacagccattaccgagccaatgcagggacaccgtcaccggtaatccctatttccacggatgcgtcgacgagctcacgtggtttttcgaggaaaagtgcgcctggatagccggattggccatgtgcatttgcttcttcaacgtttttagcatcgtgctttccactgtgctgatacaggcgttgaagaaagaagaagaacaggcggagtcttacaggaaataa

SEQ ID NO: 52 - DNA, 3021 bp, Artificial Sequence
  Psylliodes chrysocephala
atgaatattacttcggctgcggggattatatcccttctagaagaaccaagaccagaactgaaagtattcgccttaaggaaactagattccatagttgatgaattctggccagaaatctcggaagctatcgaaaaaatagaaattctgcacgaagataaagtgttccaacaacatcagctagctgctttggttgctagtaaagtttactatcatctgggtgcattcgaagattcattaacgtacgctttaggagccggtgatctcttcgatgttaacgctagaactgaatatgtcgagaccacgctcgcaaaatgtatcgacttctatacgcaacagcgcatcgctctggcagaaggtgcgaccgatgcgaaacctatagatccgaggctcgaagcgatcgtaaaccgaatgttccaacgttgcttggacgacgggcaaaaccggcaggcaatggggctcgccttggagaccagacgaatggacatcttcgaactatcgatcacgcaagccgacgatattatcagcatgctcacctacgctttccaagtggcgatgagcctgatccagaatcgagcgtttcgcaacaccgtgttgagatcgttagtaggcctgtatcgcggcttgactaccccggactacgtcaacatgtgccaatgtctgatctttttggatgatgcgctagcggtggcggaaattttagataaattagtgtccggcaaggaagagtccgaattgatggcttaccaaatagcattcgatctctacgagtccgcaacgcaacagtttctggagagagttttggtcgcgcttagagctacagctcccataccttcgctgttagaggaaaaggttaaatctaaaaccgccgaaacatctagcagcacttcagcagagtctggcagcaaagatcctgtcgtcggtgaaactaaaagcgaggcgaaagaagaaaaatctatcgagggtttgactgaaagtgaaaaggaacaccaaaaacgaatcgaaaaattgcacaccatcttatccggcgaagtatctatagaactccatcttcagtttctcattagatccaaccacgccgatcttcttattctgaagcaaacgaaagaaacggttcgagttagtatttgccacactgctacagtgattgctaacgctttcatgcacagcggtactaccagtgaccaatttttaagggataatttggaatggctagccagagcgacgaattgggcgaaacttacagccacagcctccctgggtgtcatccatcgtgggcacgagcaagaagctttgacgctcatgcaaagctatttaccgaaggaagtcggaccgagttccgggtattccgaaggcggcggtttgtacgctcttggtcttattcacgccaatcacggtgctaatatcatcgattatctccttggtcaactgaaagacgctcagaatgagatggttagacatggcggttgtttgggcctcggtttggctgctatggggacgcacaggcaagatctctacgaacagctcaagttcaatctctatcaagacgatgctaatactggagaggctgccggaattgcgatgggtatggttatgttgggatccagtaattccactactatcatggatatggtagcgtacgcccaagagagtcaacacgaaaagattcttcgcggtttggcggtcggtataagcttcaccatgtacggtcgattagaagaagctgataccctaatacaacagcttatttccgataaggatccgatcctgagaagatccggcatgtatacattagctatggcttattgcggaacgggacataaccaggcgattagaaaattattacatgttgcggtttccgatgtaaacgatgatgtgagaagagcggcagtcacagcgctcggtttcctgttgttcagaacgcccgagcaatgtcccagcgtggtgtcccttttggcggagagctacaatccgcacgtgcgttacggcgccgccatggcgctgggcatagcctgcgcgggtaccgggcttcgcgaggccatagccctgctcgagcccatggtcatgttcgatccggtgaatttcgtgcggcaaggggctctcatcgcgtccgcgatgatcctcatccagcagaccgagcaaacctgcccgaaggtcagcttcttcaggcagacctactcgcaggtgatttccaacaagcacgaagacgtcatggcgaagttcggcgccattttggcgcaaggtataatcgacgccggtggcaggaacgtgacgctgtcgttgcaatccagaacgggccacactaacatgctggcggtcgtcggtactttggtgtttacgcagtattggtattggttccctctgtcgcattgtctggctttagctttcacaccgacgtgcgtggtagcgttgaatgcgcaacttaagatgcctaaattggagttcaaatcgaacgcgaaaccgagcctctatgcctacccggcgcccatggaggagaagaaacgcgaagaaagggagaaagtcaccacggcggttttgagcatagccgcgaggcaaagaagaagggaccacgagaggaagcatcgcgacgagaaaatggatgtggacgaagataaagacgataagaaaacggagaaggaggagaaagagaagaaatccgaagacaagaaagaggagaaaaagtccgatgataagaaggcggacgataagaaagcggcgtcgtcgagcgatgataaaaaagataagaaagacgagaaggaggagaagaaaaaagagccggagcctaatttcgaaatcctgcaaaatcccgccaggacgatgaggcaacaactgaaagtgattacgctcaacgataattcgcaatacgtcgctatgaaagacgtttccatcgggggactcattatggttcgcaatttgaaacccggagaagaggaattggtggaacctgtagcagcattcggtccgaagggcgatgacgaaaaggaacccgaaccgccagaaccattcgaatggaccgaggattag

SEQ ID NO: 53 - DNA, 387 bp, Artificial Sequence
  Psylliodes chrysocephala
atgcaaattttcgtaaaaactctcaccggtaaaactattaccctcgaggtagaaccatcagacaccatcgaaaatgtcaaagcgaaaatccaggataaggaaggaattcccccagaccagcagcgattgatcttcgccggtaaacaactggaagacggccgtaccctttcagattacaacatccaaaaggagtctaccctccacttggtgctgcgtttgagaggaggaatcatcgagccctctctgcgtctgttggcccaaaagtacaattgcgacaagatgatttgccgcaaatgctacgccaggttacatccgagagccaccaattgcaggaaaaccaagtgtggacacaccaacaacttgcgccccaagaagaagctgaagtag

SEQ ID NO: 54 - DNA, 2637 bp, Artificial Sequence
  Psylliodes chrysocephala
atgagctcttttaagagagacaaaaaggaggaagaagatggagttggaaatatatttcaaaacatcgaaaaaacgactgttttgcaagaagctcgagtgtttaacgaaacatccgtcaatccaagaaaatgcaccctaattctcaccaaattgctttacctactaaatcagggtgaagctttaaacgtgaaagaagccacagatgttttcttcgcgatgaccaaactgttccaatcgaaagatgtagtccttcgaagaatggtgtatctaggaatcaaagaactcagctcgaccgcagatgatgtaatcatagttacttcgagcctcaccaaagatatgacgggcaaagaagacatttacagagcagctgctatacgtgcgttgtgcagcatcaccgatgctaccatgctgcaagccatcgaacgatacatgaagcaggcaatcgtcgatagaaattccgctgtcagttcagctgccttggtcagttctttgcacatgaccaaaatggctcctgaggtggttaaaagatgggtgaacgaagcacaggaagctattaacagcgataatgtgatggtgcaatatcatgccttggggctcctgtatcacatcagaaaatcagataggttggctgttacgaaactaatagctaaactaactagaactaccttaaaatctccatatgctgtttgtatgcttatcagaataatagctaagctcctcgaagaagaagattccggcaacgattttccctacttcgatttcatcgaatcttgtttgaggcacaaatctgagatggttgtttacgaggcagcccacgcgatcgtcaatctcaaacgtaccactagcaaggaactggcgccggctgtgagtgtattacaattgttctgcggttcaccgaaggccactttgagattcgccgccgttagaactctaaaccaagtggccatttcccatccggccgccgtcacggcttgtaatttagatttggagaatctgattaccgattccaatcgatcgatcgccacgcttgctatcactactttattaaaaactggtgctgaatcgtcagttgatcgtcttatgaaacaaatagctagtttcgtatctgaaatcagcgatgaattcaaagtcgtggtagtccaagcgatcagagcgctggctcttaaattccctcgaaagcacaacactctcatgaactttttatcggccatgctaagagatgaaggcggtttggaatataaagcttccattgcagacaccataatcaccattatcgaggataatcctgaagctaaagaatcgggtctggctcatctgtgcgagtttatcgaagattgcgaacacgtttctttagctgttagaatactgcatctgcttggtagagaaggaccgaaaaccaaacaaccttccagatacatccgtttcatttacaaccgcgtcatcttagagtgcccttccataagagcagccgctgtctctgccatggcccaattcggagcttcgtgtcccgatttgttagaaaatattcaagtattactagccagatgccaaatggactctgacgatgaagtcagagacagagctacttattacagcagcatacttagcaaaaacgataaaaacttgtacaacaactttatccttgatacgttacaggtatctataccggggttagaacgctcgttgaaggagtacacgcagaactctacgaatcaaccgttcgatataaaatcagtgccgctgcaagtgggcccgtctccggacgagcgcgagaagaagcacaaatccgaaggcatgctgtcgtcgcaggggcccctgcgaccgccgcccgtctcgcgcgaggagaacttcgcggagaaactgtcggccataccgggcatccagcagctcggtccgatcttcaagagctccgacgtggtggagctgaccgaatccgagacggagtacttcgtgcggtgcatcaagcactgcttcgcccatcacgtggtgttgcagttcgactgcctgaacacgctgcccgatcaattgctggaggacgtgcgcgtggagctggagccgagcgaagggttcgaattgctgtcggtgataccgtgcaagcagctgcattacaacgagaccaatcacacctacgccattttgaagttccccgacgacgatttgccgagttgcgtcggtacgttcggggcggtgttgaagtttatcgttaaagattgcgatcctacgactggcattcccgatagcgaagaaggatataatgatgaatacatactcgaagatttggaaataacgttgggcgatcaaatacagagggtgagcaaagttaattggggcgctgcatgggaaacggctgctgagagttccgtagaaaaggaggatacatattctctaagttcaatgaatacgttggacgaagctgtgaaaaatatcgtgcagttccttggattgcaaccggccgaaagaactgataaagtgcctgaaggcaagagcacccacacccttttattatcaggagtctttagaggtggtatcgatattttggtaagagctaaacttgctttggcggatggtgttacaatgcaattgactgtaagatcacccgatgacagcatagccgaacttattacctcttctgtaggt

SEQ ID NO: 55 - DNA, 1284 bp, Artificial Sequence
  Psylliodes chrysocephala
atgtcgaccttagaagacaaatcgatttgggaagacggcgaggaagcgctcggcgaggaagttttaagaatgtccactgacgttatcataggtcatacgcgattgctggacaatgagatcaaaataatgaagagcgaagtgatgcgaataaaccacgaactgcaagcgcaaaacgagaaaatcaaagaaaacaccgagaagataaaagtgaacaaaaccttgccttacttggtctcgaacgtaattgaactgttggacgtagatccccaggaagaggaagaggacggtgctgtagtcgatttggattctcagagaaaagggaaatgcgctgtagttaaaacgtccacgagacagacctatttcctacccgtgatagggctggtcgatgaggagaaactgaaaccgggagatctagtgggagtcaacaaagactcgtatctaattctggaaacattacctgcagagtacgatgcgagagtcaaggccatggaagtcgacgaaaggccttctgaacagtattccgatatcggaggtttagataagcaaatacaagaacttatcgaggctgttgtactacctatgactcataaagacaagttcgttaacttgggaattcatcctcccaaaggtgttctcctttacggtcccccgggtaccggtaaaaccctcctagccagagcctgcgccgcccaaaccaaatcaactttcctcaaactggccggtcctcagttagtccagatgttcataggcgacggcgccaagttagtccgagacgccttcgccttggccaaagagaaggcacccgctataatattcatcgacgagctggacgccatcggtacgaagcgattcgactcggagaaagccggagaccgggaggtccaacgaaccatgttggaactgctcaaccaactggacggcttcagctcgacatccgacatcaaagtcatagcggctacgaatcgcgtggatattctggatcccgccctgctgcggtccggaaggttggaccggaagatcgagttcccgcatcccaacgaagaggcgcgagcgagaatcatgcagattcactccagaaaaatgacggttaacccggacgtgaacttcgaggaattggccaggtctactgatgacttcaatggggcccagtgtaaggctgtgtgtgtcgaagctggaatgatcgctctcagacgtaacgccactgctgtgactcacgaggactacatggatgctattatggaagttcaagctaagaaaaaggcgaatctgaattattacgcctaa

SEQ ID NO: 56 - DNA, 660 bp, Artificial Sequence
  Psylliodes chrysocephala
atgagtttttttagtaaaatattcggaggaaaagaaaaggatacgggtcccacgcccggagaagctatccaaaagctcagggaaaccgaggacatgttatataaaaaacaagagtttttagaaaagaaaatagaggaatacacattaatagccaaaaagaatgcatcaaagaacaagagagttgctttgcaagcgctcaaaaagaaaaaacgcttggaaaaaacccaattacaaatcgatggaacactcactaccattgaaatgcaaagggaagccctcgaaggagccagtaccaacacagccgtcttagattccatgaagaatgctgctgaagccctacagaaagcccacaaaaacttgaatgttgatgatgtccatgatatcatggatgacatagctgaacagcacgatattgctaatgagattactactgctattagccagccggttggcttcaatgatgatctggatgaggatgaattagaaagtgaactagaaaagcttgaacaagaaggattagaggaagatttgctgaaagtgcctggtcctactgaattacctgctgtacctacaggagctatcgctaagccagttaaacctgctgctaaaaaagtggaggatgatgatgacatgaaagaattggaagcttgggcttcgtaa

SEQ ID NO: 57 - DNA, 609 bp, Artificial Sequence
  Psylliodes chrysocephala
atgaatcctgagtatgattacttattcaagctgcttcttatcggcgattctggagtaggaaaatcgtgtttgctattgagatttgcggatgatacttacacggagagttatattagtactattggagtagattttaaaatcagaacaatcgacttagatggaaaaacaattaaattgcaaatttgggataccgccggacaggaaagatttagaactataacatcgagttactacaggggcgcgcacggaatcatcgtcgtgtacgattgcacagatcaggactcgttcaacaacgtgaaacaatggttggaggaaatcgaccgttacgcatgcgacaacgtcaataaattacttgtaggaaataaaagtgatcttacgactaagaaagttgtcgatttcaatacggccaaggaatacgcggatcagttgggcgtaccgtttttggagacgtcggcgaagaacgccaccaacgtagagcaggcctttatgacgatggcggcggaaattaaaaatcgattagggccgccgaccgcggccgcggatcaaggaaacaaagttagattcgatcaaagtcgtcctgttgaaacgactaaatcgggatgttgctga

SEQ ID NO: 58 - DNA, 651 bp, Artificial Sequence
  Psylliodes chrysocephala
atggcaacaaatcgaactggcgccgcccaaagaccaaacggcgctacccagggtaaaatctgccagttcaaattggtgttgctcggcgagagcgccgtcggtaaatccagtctggtgctgaggttcgtcaagggccagttccacgagtaccaggagagcaccatcggggccgcctttctcacccaaactatctgcttggacgacaccaccgttaaattcgaaatatgggacaccgcgggacaagaaaggtatcacagtttagctccgatgtactacagaggggcgcaggcagctatagtggtgtacgacataaccaatcaagatacgttcggcagagcgaaaacgtgggtgaaggaactccagaggcaggccagtccgacgatcgtgatagccctagccggcaacaagcaggatttggctaacaagcggatggtggagtacgaggaggcccaaacctacgccgatgagaacggtttgcttttcatggaaacatcggcgaaaacggcgatgaacgttaacgatatatttttagcaatagctaagaaactgcccaaaaacgaacaaacatccggtcaggggggcagcgcccaaggcaggcgattggcagaaggagatgcgggcgccaaggccccgggaaactgctgcaagtga

SEQ ID NO: 59 - DNA, 549 bp, Artificial Sequence
  Psylliodes chrysocephala
atgggtaatgtgtttgctaatttatttaaaggcctcttcggcaaaaaggaaatgaggatattgatggtaggtttagatgctgctggtaaaaccacaattttatataaactaaaattaggagaaattgtaacaaccatcccaactattggttttaatgtcgagactgtagaatataagaatatcagctttactgtgtgggatgtcggtggtcaggataaaattaggccattgtggagacactattttcaaaatacgcagggcctaatcttcgtagtcgacagcaacgacagggagcgtatcaccgaggccaaagacgagctgatgcgcatgctggccgaagacgagctccgggacgccgttcttttgatattcgccaacaagcaggatttgccgaacgccatgaacgccgccgaaatcaccgataagctcggattacattcgttgcgcaaccgtaactggtacatacaggccacgtgcgccaccagcggagacggtctctacgaaggtctcgattggctgtccaatcagctgaagaacgccaatcgttag

SEQ ID NO: 60 - DNA, 5055 bp, Artificial Sequence
  Psylliodes chrysocephala
atgacgcagcaactgttaccaatcaagtttcaagaacatttgcagcttaccaatgtcggtatcaatgcggctaacatcacgtttgccactctcaccatggagagcgacaaatacatttgcgttagggaaaaggtcggggaaacatcccaagtggtcatcctcgatatggcggacaccgcgaaccccatcaggagacccatcacggcggaaagtgcaattatgaatccggcttctaaagtcatcgctctcaaaggcaaagccggcatcgaaacgcagaaaaccctccaaatattcaacatagaaatgaaatcgaagatgaaggcgcacacgatgtcggaggacgtgtttttctggaaatggatcagccccaatacgttggctctggtcaccgagacgtccatctatcattggtcgatggagggcgattctattccgcaaaaaatgttcgacagacattcctctctgaacggttgccagatcatcaactaccgcacggacccgaagcaaaactggctgctgttggtgggcatcagcgcccagcagtcgcgcgtcgtcggcgccatgcaattgtactcggtcgaacggaagtgctcgcagccgatcgaaggccacgccgcctcgttcgccaccttcaagatggagggcaacccggagccgtcgacgctcttctgcttcgccgtcaggacgctgcagggcggcaagttgcacatcatcgaggtgggccagaacccggccggcaaccagccgtttcccaagaagtccgtggacgttttcttcccgcccgaggcgcagaacgacttccccgtggcgatgcaggtctccaccaagtacgatgttatttacttgatcacgaagtacggttacattcacatgtacgatatcgagagcggcacttgcatctacatgaaccggatatcgagcgatacgattttcgtgacggctccgcacgaatccaccggcggtattatcggcgttaatagaagaggtcaagttctatcggtgtctgtggacgaggagagcattattagatacattaatacggtattgcataacgctgatctagcactacgtttagctactagaaacaacctggctggtgctgaagatttgtttgtcagtaaattccagatgcttttccaaaacgggcagtacgccgaagccgctaaagtcgccgccaacgctcctaaaggaatcctcagaacgccagctacaatccaaatgttccagcaagttccaactcaacccggccaaaatagccccttattgcaatactttggtatacttctcgatcaaggacaacttaatagatacgaatcgttggaattgtgcaaaccggttttgcttcaaggccgcaaacaactattagaaaaatggctgaaagaggagaaattggagtgctcggaggaattgggcgatctggtcaaacaagccgatcccacgttggctctatcggtgtacctcagggccaacgttccggcgaaagtgatccagagcttcgccgaaaccgggcaattccagaagatcgtgttgtacgccaagaaagtctcctacacgcccgattacgtgttccttttgcggcaagtcatgcgcaccaaccccgatcaaggcgccgccttcgccggcatgctggtggccgacgaggagcctttggccgatatcaatcaaatcgtcgacatcttcatggaacagaacatggtgcaacagtgcaccgccttcctgttggacgccttgaagaacaacagacccaccgaaggtcacttgcaaacaagattactggagatgaatttgatgtcggcgcctcaagtggccgacgcgatcctcggcaacaacatgttcacgcactacgatcgcgcccacgtcgctcagctctgcgagaaagccggtcttttgcaaagggccctcgagcactacaccgatttgtacgacatcaagcgggccgtcgtccacactcacctgctgccggccgattggctggtgaatttcttcggaacgttgagcgtcgaagacagcttggagtgcctgaaggcgatgctgacggctaacatcagacaaaacctgcagatttgcgtgcaaatcgccaccaaataccacgaacagctcaccaccaaagctctcatcgatctgttcgagagcttcaagagttacgaaggtttgttttatttcctcggttcgatcgtaaacttctcccaagaccaggaggtgcactttaagtacatacaagcggcgtgcaagacgggccaaatcaaggaagtcgaacgcatctgtcgcgaatcgaattgctacaacgccgagcgggtgaaaaacttcctgaaagaggccaaactgaccgatcaattgccgctcataatcgtttgcgatcgcttcgatttcgtccacgatttggtcttgtacctctacaggaactccttgcagaagtacattgaaatttacgtgcagaaagtcaaccccagtcgtttgcctgtcgtcgtgggcggactgttggacgtcgattgttccgaagacattattaaaaatctaattttggtagtaagaggacaattctcgacagacgaattggtggaagaagtggaaaagagaaaccgattgaagctgctgttgccttggttggagagccgagttcacgaaggatgcgtcgaacccgccactcacaacgccctggcgaaaatttacattgattccaacaacaacgccgagaggttcctcaaagaaaaccaatggtacgattcgcgcgtagtgggccgttactgcgaaaaacgcgatcctcacctggcttgcgtcgcctacgaacgaggccaatgcgacagagaattgatcgcggtgtgcaatgagaattccctgttcaagtccgaggcccgttacttggtgcgcaggcgcgacggcgaattgtgggctgaagtacttcaagaaagcaacccgtacagacgtcagttgatcgatcaagtagttcaaacggcgctcagcgaaactcaggatcccgaagacatctccgtgactgtgaaagctttcatgacagccgatctaccgaacgagttgattgaattgctggagaagatcgtgctggatagttccgtgttctccgaacataggaatctccagaatttgcttattcttaccgcaatcaaagccgatgctaccagagtcatggattacattaaccgtttagacaactacgacgctcccgatatagcgaacatagctataaacaaccatttgtacgaagaagctttcgccatcttcaaaaagttcgacgtcaacacttccgcgatccaagtgctcatcgagcaagtcaacaatctcgatcgagcttacgaattcgccgaacgttgcaacgaaccggccgtgtggagccagctggccaaggcccagctcaaccagggcctggtgaaggaggccatcgattcgtacatcaaggcggacgatccgtcggcctacatcgacgtggtcgaaacggcttcgaagaacaacagctgggaggacctggtgcgctacctgcaaatggcccgcaagaaggccagagagagctacatcgaatccgagctgatctattcgtacgccaaaacgggccgattggccgacctcgaagaattcatcagcggtcccaatcacgccgacatccaaaaaatcggcgacagatgcttcgacgataaaatgtacgacgccgccaagttgttgtacaacaacgtgtcgaacttcgcccggctggccatcacgctggtgcacctgaaggagttccagggggccgtcgacagcgcccgcaaggcgaacagcaccaggacgtggaaggaggtgtgcttcgcctgcgtcgacgccgaggagtttaggctcgcgcaaatgtgcggcatgcatatcgtcgtgcacgccgacgagttgcaggatttgataaattattatcaagacagaggttacttcgaggagttgatcggcctgttggaggccgctttggggttggagagagcgcatatgggaatgttcaccgaactggctatattgtattcgaaatataaaccggctaggatgcgcgaacatctcgaattgttctggtcgcgcgttaatattcccaaagtgcttagagccgccgaacaggcgcatctgtgggccgaattggtgtttctgttcgacaaatacgaagagtacgacaacgccgtcttggcgatgatgatgcatccgacggaggcgtggcgcgagggccatttcaaagacatcatcacgaaagtggcgaacatcgaattgtactacaaggcgattcaattctatctcgatttcaagccgctgttgttgaacgatcttctgttggtgctggctccgagaatggatcacactagagccgtggctttcttcagtaaaaccggccacttacagctggttaaatcttacttacgatctgtccaaaatttgaacaataaagcgatcaacgaggctctcaattctctgcttatagaggaagaagacttccaggggctcagaacatccatagacgcgttcgataacttcgataacataggtttagcgcagagattagaaaagcacgaattaaccgaatttagacgcatcgccgcttacctatacaaaggcaacaaccggtggaaacagagcgtggaattgtgcaaaaaagacaggctgtttagagacgccatggaatacacgtcggaatcgagaaaccaagaattggccgaggaactgctcgcttggttcttggacagaaaggcgtacgattgcttctcggcttgtttgtaccactgttacgatttgctgcgaccggacgtcattttggaattggcttggaagcacaacataatggactttgcgatgccgttcctgatccaggtgaccagggaactgacgacgaaggtcgagaaattggagcagtccgacgctcagcgacaaagcgaagcggcggaggagacgaacaagccgatcatgatgccggaaccgcaacttatgctgacggctggtccgggcatgggtattccgccgcagcaatacatgccccaacagacgtacgcccaagtgggctatgcaccgcaaatggcctaccaaggttatccgggcatgtaa

SEQ ID NO: 61 - DNA, 3672 bp, Artificial Sequence
  Psylliodes chrysocephala
atgttgaccaagttcgaaaccaaatcggcaagggtaaagggactgtctttccatcccaaaaggccatggattttagccagtttgcacaacgggtgcatccaattgtgggattatcgaatgtgcacgcttctggaaaagttcgacgagcacgatggacctgtaagaggcatatgtttccacaatcaacagcccctattcgtctcaggtggcgatgattacaaaataaaagtatggaactacaaacagaaacgttgcattttcactctgctcggccatttggattacatccgtacgactacgttccaccacgaatacccctggatcgtatccgcatccgacgatcagaccatcaggatatggaactggcaatcgagaacgtgcatttgcgttttaacaggccacaatcactacgtgatgtgcgccactttccatccgagcgaggatctactactatccgcttctttggattccaccgttagagtttgggatatttccggcctgcgtaagaagaacgtggcacccggccccacgggcctcgaagaccacctcaaaaatccgggagccaccgagctattcggccaagccgatgctgtggtgaagcacgttttggaaggacacgatcgcggagtgaactgggcatcgtttcatccgttcctacctttaatagcttccggagccgatgacaggcaaatcaaactatggaggatgaacgattcgaaggcttgggaagtggatacctgcagagggcattacaacaacgtgtcttgcgtgttgttccatccgagacaggagctgatactatctaacggtgaagatagaagcataagggtgtgggatatggcgaagaggacttgcttgcacacgtttagaagggaacacgaacgattttgggtcatgacgagccatccgaatcttaatttattcgccgctggtcacgatggcggtatggtaatatttaaattggaacgagaacgaccggcttatacagtacacggtaacttactgtattacgttaaagaaaaatatctgagaaaactcgattttaccacgtctaaagacgtccccgttatacaaatcagaggcggcggtaaaattccagtgtacagaatgtcctttaaccccgccgaaaacgccgttttactatcaactcgcacttctaatctcgacaacagcacttacgatttgtacatgattcccaaggatcaagaaagggaagaccacgtgccggaagccgaaagcaagagatcgtccgggctgaccgccttgtgggtggccagaaatcgattcgccgtactcgacaggacgcaccagttgatcattaaaaatctgaaaaacgaagtcaccaagaaagtccaaacgcccacttgcgatgaagttttttacgcaggcacgggcatgctgttgttgagagactccgaacacgttacgttgttcgatgtccagcaaaagaggactttggctcaagttaaaatcagcaaatgcagatacgtcgtttggtcatctgatatgtcgcatctggcccttttatctaagcataacgtgacgatttgcaatagaaaattggatgttttgtgctcgttgcacgagaataccagagttaagtcgggtgcttgggatgacagcggagtgtttatttacactactagtaatcatattaaatatacattgaaaaatggtgatcacggaattattagaacgctcgatcttcccatttacataactagagtaaaaggtagccaggtgttctgtttggacagggaatgtaagcctcgcttattagtaatcgatcccaccgaatacaaatttaaactcgcgttgatcaatcacaagtacgaggaagttttgtacatggtcagaaactctcgattggtaggccaaagtattatatcctacttgcaacaaaaaggatatccggaagtagctttgcattttgtgaaagatgataaaactagatttgctctggctttggaatgcggaaacatcgaaatcgcattagaggccgctaaagctctaaacgataaaaattgttgggatcaattggcgcaagccgccttgtggcaaggcaaccaccaaatcgtagaaatgtgctatcaacgtacgaagagcttcgaaaagctatcgttcctctatttgatcaccggcaatttggagaaactgagaaaaatgatgaaaatcgcggaaatccgaaaggccagatcgtctcagtaccacgccgcattgctgctgggcgatctcgaagagcgcgtgaaactcctcaaagcctccaatcaattatccctggcgtatttgacggccgccacgcacggcatgcgagaggaggccgaacagctcaaagaacaaatcggcgacgataagaaactgcccgacgtcgatcccgacgcgaagttcttgaaaccccctccgcccatccaacaagcagagtccaattggcctttactcacagtcagcaggagtttcttcgagaacaccgccgccgcggcgaccgcctccgccaacatgaaatccctcatggccgagcccgtttccgacgtgggaatggaggacgcccagggctggggcgacgacgacgaattggagctggatcccgacgagaagaaggccgaagtcgcggccgccgggggcggcgacggcgagggcggctgggacgtggaggacgaaggtttggaaataccggatctcggacctgcggcgacggtggaggcggagggtaatttcgtgcatttgcccacccaagggccgtctgcgcttgtgacttggacgaagaattcgcagttggtggccgatcacgtggcggcgggttcgttcgaatcggccgctcgattgctgcacgatcaattgggagtggtgaatttcaggccttacgaaagtttgttcttgaatttgtacagtacttcgaagacggtgtcttcttggcagcaaaacgtaccgccttcgttcagttaccctttgaggaattggaaagaggcgaatattaaaaaccagttgcccgcttcgggagtgaaattaaacgatttagtcgctaaattgcaggtttgctatcaactgaccaccggtggtaaattcacggaagccatcgagaaactacaaactctgctgctgtcggttacgcttctcgtggtggataacaaacaagaaatttccgaggctcagcagttactgagaatagccagcgagtatatttgcggattgcaaatggaaactttgaggaaaaccttgccgaaaacatcggccgaagagcagaagcgccagtgcgagatggccgcgtattttacccattgtaaactacagccgatacatcaaatcctgacgcttagaacggcgctcaacatgtttttcaagctcaaaaactacaaaactgccgcttccttcgccaagaggctcttagagctcggtccgagacccgaggtggcccagcaagctaggaagatattgcaagcgtgcgatacgaatctgaccgatgacttccaattgcactacgacgagcacaatcctttcaacttgtgcgggcactcgtacacgcccatttacaggggcaaggccgaagagaaatgtccactgtgcggtacctcctatttacctaaatataaaggggtgttgtgtaatatttgcaaagtggcggaagttggaaaggatacgatcgggttgaggattagcacgcaccagtttaggtaa

SEQ ID NO: 62 - DNA, 552 bp, Artificial Sequence
  Psylliodes chrysocephala
atgggccgatacgctcgcgaacccgacaatgcggcgaagtcttgcaaagccagaggctctaacctcagagtccacttcaagaatacgtgcgagaccgcgaacgccataaggaagatgcccctcaagcgggcagtggcctatttgaagaacgtagtcgtccaaaaagagtgtattccattcaggaggttcaacggaggagtaggccgttgtgcccaagccaagcaattcggcaccacacagggaaggtggcccaagaagtcagccgaattcctgttacagctcctcaggaacgccgagagcaacgcagattacagcgggcttgatgtcgataggctagtcgtagaacacattcaagttaaccgagctgcttgtttgagacgtcgtacgtacagggctcacggtaggatcaatccgtacatgtcatcgccctgtcacatcgaactctggttaaccgagggagaatcgtcacctgaggctcctaagaagagcaacaaaaagaaggcaacggagaagaagagacccaagtcgtccgttgctgcagtagcgcattga

SEQ ID NO: 63 - DNA, 315 bp, Artificial Sequence
  Psylliodes chrysocephala
atggtgaacgttccgaaacaaaggcgtacattttgcaaaaaatgcaaagtccacaagctgcacaaggtgacgcagtacaagaaatccaaggaacgtcacgctgcgcagggtagaaggcgttatgacagaaaacagcagggtttcggtggtcaaactaaacctattttcaggaagaaggcaaaaaccaccaagaaaatcgtgttgaggatggagtgtgcagattgcaagtacagaaagcagttccctttgaagagatgcaagcacttcgaacttggaggtgacaagaagcgcaagggccagatgatccagttctaa

SEQ ID NO: 64 - DNA, 773 bp, Artificial Sequence
  Psylliodes chrysocephala
ggaaatacggtgcaatggaaaatgtgcactttaactccaagtaccactatagcgctgtttttcgaagtggtcaatcagcattctgcaccgattcctcaaggaggaagaggatgcatacaatttattactcaatatcagcattctaatggccagagaaggatcagagtgagtaccatagctcgcaattgggcggacgcgaccgcgaatattcatcacattagcgctgggttcgatcaagaagcggccgctgtaattatggccaggatggctgtatacagagcggaatcggacgatagtcctgatgttcttagatgggtggacaggatgttgattagattgtgtcaaaaattcggagaatacaacaaggacgacgcgaattcgttcagattgggtcaaaactttagcctctatccccaattcatgtaccatctgagacgttctcaattcctgcaagttttcaataattcaccggacgaaacgtcgtattatcggcacatgttaatgagagaagatctgacgcagtctttgattatgatccagccgattttgtacagttacagcttcaacgggcccccggaacccgttctgttggatacgagttcgattcaatcggagaggatattattgatggacactttcttccaaatattgatattccacggagagacaatagctcagtggcgtaacttgaaataccaagatatgccggaatacgaaaactttagacaactgttacaagcacccgtggacgatgctcaggaaatattgcagac

SEQ ID NO: 65 - DNA, 751 bp, Artificial Sequence
  Psylliodes chrysocephala
aaaaattggattgtcagtggatctgatgatatgcagataagggtttttaattataataccctagatagagttcatgcctttgaagcgcattctgattatgttagatccattgttgtacatcctacacagccatatattctaacaagtagtgatgatatgcttatcaaattatggaattgggaaaaagcatgggcctgccaacaggtgtttgaaggccacatccattatattatgcaaatttccataaaccctaaagacaacaacacctttgccagtgcttctttagacaggaccataaaagtctggcaattgggtgcttccactgcaaatttcactctcgaaggtcatgaaaaaggagtaaactgtgttgattattaccatggaggtgataaaccatacctaatatctggtgcagatgatagattagtcaaaatttgggattaccagaataaaacttgtgtccaaactttagaaggacatggacaaaacgttactgctgtttgtttccatcctgaactcccaatagctcttactggaagtgaagatggtactatcagagtttggcatgcaaatactcacagattagaaagcagtttgaactatggctttgaaagagtatggactattttctgcttgaagggttccaataatgttgctttaggttatgatgagggtagcattttggtgaaagttggtagagaggaaccagctgttagtatggatgcaagtggtggaaaaattatttgggcta

SEQ ID NO: 66 - DNA, 787 bp, Artificial Sequence
  Psylliodes chrysocephala
tgtcagatatgaagctgctggtacacttgtaacactttcaagtgctcccacagcagtaaaagcagctgctagttgttatattgaactaattatcaaggaaagtgataataatgtaaagttgattgtcttggacagattgattgcccttaaggaacatcccagccatgaaagggttttgcaagatttggttatggatatattaagagtgttgcaagctcctgacttggaagttcgcaaaaagactttaaacctagcacttgaactggtatcatctcgtaatatagaagaaatggttttggttcttaaaaaggaggtatcaaaaaccgtagatagcgagcacgaagatacaggaaaatacaggcagttacttgttagaacacttcattcttgttgtataaaattcccagatgtagctgtaactgtcattcctgttttaatggaatttttgtctgatagtaacgagttagctgctactgacgtgttactatttttgagagaggccatacagaagtttgataatctgcaaccacttattattgagaaacttctagaaacattcaaagatataaaatctgttaaagtgcatagagcagctctttggatattgggagaatatgccacttctgtctcagacattgaagctgttattaaagaaattaatcaaaccttaggagaagctcctctgttggaaactgaacaaaaactaatttctggagagacagacgacacaactacagttccaacaggtggagctacaactttggttacttcagatggtacttacgcc

SEQ ID NO: 67 - DNA, 474 bp, Artificial Sequence
  Psylliodes chrysocephala
ggaagcctccgatactattgaaaatgtaaaagcaaaaattcaagacaaagaaggaattcccccagatcagcaacgtttgatttttgctggtaagcagttagaagatggccgcaccctgtctgattacaatattcagaaagaatcaactttgcacttagttttacggttgagaggaggaatgcagatttttgtgaagactttaacaggaaagaccatcacattagaagtggaaccatccgattcaattgaaaatgtaaaagccaaaattcaagacaaagaaggaattcccccagaccaacaacgtttaattttcgcaggaaaacaattagaagatggaagaactttgtctgactacaatattcaaaaagaatctacactgcatttagttcttcgtcttagaggtggaatgcagattttcgtcaaaactcttactggtaagaccataactttggaagtggaagcctctgatacaat

SEQ ID NO: 68 - DNA, 454 bp, Artificial Sequence
  Psylliodes chrysocephala
gcacaaagcgttatcgttatgaaaacagatgaaaataagctgtttaaactttctaacaaactcgtaatggctgtatcaggagaatccggcgatactacacaatttgcagagtatatagctaaaaatattcaattatataaaatgagaaatacatatgaattaagtcctgcagaagcagctgcttttactcgtaggaatctagctgatacactccgaagcaggagtccttaccatgtaaatttacttttggctggatatgatgcaaaggatgggccacaattatattacatggactacttggcttctatagccaaagtggattatgctgctcacggctatggaggcttcttctcactatccataatggatcgcaactatttgaaaaacctctccaaacaacaaggttatgaattattgaaaaaatgtgttaaagaggttcagaagagactgatca

SEQ ID NO: 69 - DNA, 382 bp, Artificial Sequence
  Psylliodes chrysocephala
aggcctctaaagcaaagaaggccaagaaaggtttcatgacacctgagagaaagaagaaacttaggttactgttgagaaagaaagccgctgaagaactaaagaaagaacaagaacgtaaagctgcagaaaggaggcgtatcattgaagaaaggtgtggtaaacccaaattgatcgatgatgccagtgaagcaaaacttaaaacagtttgtaaaacatatcacgaacgaattgacaaactagaagataagaaatttgacctggaaaatgaagtggaattcaaagattttcagatctcggaattaaacagtcaagtaaacgacctcagaggcaaattcgtcaaaccaacattaaagaaggtatccaaatacgaaaacaaattcgc

SEQ ID NO: 70 - DNA, 573 bp, Artificial Sequence
  Psylliodes chrysocephala
tctcgaaccaagatgtttcataagaaagctttatacaaatttattggtaaaaaagtagccgctgaaaaaaaacctattaagccacgtgttatcgagaaacagatcggtggcgaaaaaaacggtggaaaacgttatgtattggtagaaaagcgtcgggcagtttaccctacacaagacagaatcaagaagcgaccagctaaacagttatttaaggatcatgccagaacattaagagcctcgatcagccctggaacagtacttattcttttggccggttcacataaaggaaagcgtgtcgttttcttaaaacaacttaaatcggggctgctccttgttaccggtccgtttggcattaacgcttgccctctgaggagaatcagtcaaagatatgttattggtacacagacaaaaattgacgttagcggtgttaaattaccggaaaatattaacgatgaatatttcaagagacaaagacagaagcgggcgaaaaaagaagagggagacatttttcaaaccaaaaaacaaggatataaagtcagcgatcaaagaaaaactgaccagaaagaagtcgat

SEQ ID NO: 71 - DNA, 544 bp, Artificial Sequence
  Psylliodes chrysocephala
cccacagtactggaacttctataatggcagcagaatttgatggcggtgttgttataggagctgattctcgaacaactacaggggcgtatattgcgaatagagtagcagataaattaacgaaaataactgatcatatttactgttgtcgttctggatctgctgctgacacccaagctattgctgatattgtagcatatcacttaaatttccatggtatggaattgggtgaggaacctcttgtagaagtaggagcagcaatcttcaaggaactttgctacaactacagagattcgttaatggctggaatactcgtagcaggttgggacaagaaaaaaggtggtcaagtctattccatacccattggtggaatgtgcgttagacaagaagtttctattggaggttccggttccagctatgtttatggttatgtagatgctaactttaaacctggaatgtcaaaggaagactgcgttaagtttgtttcaaatactttggctctagcaatgtctagagatggttcatctggaggtgttgtcagaatagg

SEQ ID NO: 72 - DNA, 695 bp, Artificial Sequence
  Psylliodes chrysocephala
ttagaaaatcagattgccgtcattaaatacgtgatactctttaccaacgtcttgctatgggcccttggcggagcaatttttggtctttgcctttggctaaggttcgaagagggcatccaagaatggcttcagaaattagattccgagcaattttacatcggggtttatgtacttatagtcgcttcagtgatcgtcatgattgtgtcctttctgggatgtattagtgccctgcaggaaagttcgtttgcccttttactgtacattggcagccaagtgctcagttttatattcggtttatccggttcagctgttcttctggataacagcgccagagattcccacttccaacccagaatccgagaaagtatgcgacgtcttatcatgaatgctcatcacgaggcatccaaagaaacacttgccatgattcaggaaaatattggttgctgtggcgctgatggagcaagtgattacttatctctgcaacagccgttgccaactcagtgcagagatacagttacaggtaatccttattaccatggatgtgttaacgaactcacatggttctttgaagagaaatgcggatggattgcaggattagccatgacgatttgttttattgctgttttaaacgtcgttctttcaacagtacttattcaagctctaaagaaagaagaggaacaagccgattcttacag

SEQ ID NO: 73 - DNA, 716 bp, Artificial Sequence
  Psylliodes chrysocephala
cgtcctgaggtctctagttggtctgtatcggggtctaactactcccgattacgtcaatatgtgccagtgtctaattttcttagacgaccctctcccagtggctgaaatcttagataaactcgtgtctggtaaagaagatactgaactgatggcctaccaaatagcattcgacctatacgagtcagcaactcagcagtttttggagagggtattggtagctcttagagctactgctccgattccgtcgctgctggaagagaaggctaaacccaagattggcgatcaagccagtagcacttcagctgaggcttcgactggcgatgccactgttagtgaatcaaagactgaagttgttaaggaagagaaatctattgatagtttgtctgatcatgaaaaagaacaccagaaacgtatcgaaaagttacacaccattctttcaggcgaagtgtccatcgaacttcatcttcaatttcttatcagatctaatcatgctgatctccttattttgaaacaaacaaaagaaaccgtccgcgttagtatttgtcatactgctaccgttatagctaatgctttcatgcacagcggtaccaccagtgatcaatttttaagagataacttagaatggttagcaagggctacaaattgggccaaactcacggctacggcttctcttggcgtaattcacaggggacacgagcaagaagctttgaccttaa

SEQ ID NO: 74 - DNA, 250 bp, Artificial Sequence
  Psylliodes chrysocephala
caaagatccaggacaaggaaggtatccctcctgaccagcagcgattaatcttcgctggaaaacaactcgaagatggacgtactctttcagactataatatccagaaagaatccacccttcatttggtgctccgtttgagaggaggtatcatcgagccctctctgcgtctcctagctcagaaatacaactgcgacaagatgatctgtcgcaaatgctatgctaggttacaccctagggctactaattgcag

SEQ ID NO: 75 - DNA, 752 bp, Artificial Sequence
  Psylliodes chrysocephala
tgtcaatctcaaacgtaccaccagcagagaattagctccagctgtaagtgttctgcaactattctgtggttctccaaaaccaacactaagatttgctgcagtcagaacattaaatcaagtagctatttctcaccctgcagctgttacagcttgcaatctagatttagaaaacttgattactgattctaacagatcaattgctactttggctataactactctgttaaaaactggtgctgaatcatctgtagaccgtctcatgaaacaaattgcaagtttcgtttctgaaatcagtgatgaattcaaagttgtagttgtccaagccatcaaggcactagctctcaagtttcctcgcaaacatagcacactaatgaatttcctgtcagccatgttaagggatgaaggaggtctggaatataaagcatctattgctgatactatcataactattattgaagacaatccagaagctaaagagtcaggtttggcacatttgtgtgaatttattgaagattgtgaacatgtttctttagctgtaagaattttgcatttgttgggaagagagggtccaaagacaaagcaaccttcaagatacatccgtttcatctacaatcgagttattttggaatgtccatctataagagccgcggcagtgtccgcaatggcgcaattcggcgcttcctgtccagatttgttagaaaacattcaagttttacttgcaagatgtcaaatggattcggatgatgaagtta

SEQ ID NO: 76 - DNA, 701 bp, Artificial Sequence
  Psylliodes chrysocephala
ctatggaggtggatgagagacctgctgaacagtactcagatattggaggtttagataaacaaatccaagaactgattgaagctgttgtgttaccaatgacccataaagataaatttgttaatttgggtattcatcccccaaaaggcgttttactatacgggccacctggaactggaaaaaccctccttgccagagcatgtgcagctcaaacaaaatcaaccttcttaaaattagctggcccccaattagtccagatgtttattggtgacggcgccaagcttgtgagagatgcattcgctttagccaaagaaaaatctcccgctatcatatttatcgatgaactggacgcaataggcacaaaaagattcgattctgagaaagcgggtgacagggaagtgcaacgtactatgttggagttgctgaaccagctggatgggttcagttcaaccgccgatatcaaagtgatagctgctaccaatcgtgtcgatattttagaccctgctctgcttcgatctggtagattagacagaaagatagaattcccgcatcccaatgaagaagcgagggctagaatcatgcagattcactccaggaaaatgactgtcaatcctgatgtgaattttgaagaactggctaggtctacagatgactttaatggagcccagtgcaaggctgtgtgtgttgaagctggtatgattgct

SEQ ID NO: 77 - DNA, 474 bp, Artificial Sequence
  Psylliodes chrysocephala
acacattattagctaagaaaaatgcctctaagaataaacgagtggcccttcaagctcttaagaagaagaaaagattggaaaagactcaactgcaaatcgatggaacacttacaactattgaaatgcaaagagaagccctcgaaggagctagtactaacacagcggttttagattctatgaaaaatgctgctgatgcccttaaaaaagcacacaagaacctggatgttgataatgttcatgatataatggatgatatagcggaacaacacgacattgccaatgagatcacaaacgctattagtaatccagttggtttctcagatgatatggatgaagatgaattagaaaaggaactggaggagctcgaacaagaaggtttagaagaagatttactcaaggttcccggacctacagaacttccagccgtgcccgctggagctattgctaagccggcagttgttaaacctgcagcta

SEQ ID NO: 78 - DNA, 473 bp, Artificial Sequence
  Psylliodes chrysocephala
tgcagatgatacttacacggaaagttatattagtaccattggagtagattttaaaatcagaacaatcgacttagatggaaaaactattaaattgcaaatttgggacactgcagggcaagaaagatttagaaccattacctcgagttactacaggggggcgcacggtatcattgtagtgtacgattgcacggaccaagattcatttaacaacgttaaacaatggctggaagaaatcgaccgttacgcatgcgataacgtaaacaaattacttgtagggaataaaagtgatcttacgactaagaaagttgtcgatttcaacacggccaaggaatacgctgatcagttaggtatcccatttttggagacgtcggcgaagaacgccacgaacgtagagcaggcctttatgacaatggcggccgaaatcaaaaatagagtaggacccccatcatctgccgcagaccaaggaaataaag

SEQ ID NO: 79 - DNA, 511 bp, Artificial Sequence
  Psylliodes chrysocephala
agatctgtcagttcaagctcgtcttgctcggcgagagtgctgtcggtaaatcgagcttggtgctgaggttcgtcaaaggacagttccacgaatatcaggaaagcaccatcggagcagctttccttacacaaaccatttgcctggacgatacaactgtcaaatttgaaatatgggatacagcgggacaggaaaggtatcacagtttagcccctatgtactataggggcgcacaggcagctatagtggtctacgatattaccaaccaagacacgttcggcagggcgaagacgtgggtgaaagaacttcagaggcaggccagccccacaatcgtgatagctttggctggcaacaagcaggacttggccaacaagaggatggtggagtatgaagaagcgcagacttacgcggacgaaaacggattgttatttatggaaacctctgcaaagacagcaatgaatgttaacgatatatttttagcaatagctaagaaattgcccaagaatgaacaaac

SEQ ID NO: 80 - DNA, 449 bp, Artificial Sequence
  Psylliodes chrysocephala
gtaggtttagatgctgctggtaaaaccacaattttatataaactaaaattaggagaaattgtaacaactataccaactattggatttaatgtggagactgtagaatataagaatatcagctttacggtgtgggacgtgggtggtcaagataaaattaggcccttgtggagacactattttcaaaatacacaaggcctaatcttcgtagtggacagcaacgatagggagcgtatcaccgaggccaaagacgagctcatgcgcatgctcgccgaagacgagctccgggacgccgtacttctaatattcgccaacaagcaggacctgcctaacgccatgaacgcggccgaaatcaccgacaagctcggtctgcattcgctgcgcaaccgcaattggtacatccaggccacgtgcgccaccagcggagacggtctctacgaaggtctcgattg

SEQ ID NO: 81 - DNA, 87 bp, Artificial Sequence
  Psylliodes chrysocephala
  misc_feature (1)..(87): n is a, c, g, or t
nnnnnnnnnnnnnnnnnnnnnnnnnnnnnnnnnnnnnnnnnnnnnnnnnnnnnnnnnnnnnnnnnnnnnnnnnnnnnnnnnnnnnnn

SEQ ID NO: 82 - DNA, 702 bp, Artificial Sequence
  Psylliodes chrysocephala
aacatgaacgtttttgggtcatgaccagtcatcctaatctgaatttattcgctgctggacatgatggtggaatggtcatcttcaagctagaaagagaacgcccagcttatacggtacacggcaacctgctgtactacgtaaaagaacggtttttgagaaaactcgactttaccacgtccaaagacgtgcccgttatgcaaatcaggggcggaggtaaaattccggtatacagaatgtcttttaatcccgcagaaaatgccgttctactttcgacgcgcacttccaatttggataacagcacttacgatctgtacatgattcccaaagatcaagaacgcgaagatcacgttccagaggcagaaagtaagagatcctctggtttgacggctctttgggtggcgagaaaccgtttcgctgtcttagataggacccaccaattgatcatcaagaatttaaagaacgaagtcaccaaaaaggtccaaactcccacgtgcgatgaagttttttatgccggcaccggcatgctactgcttagagattcggaacacgtaacgttgttcgacgtacaacagaaaaggactttggctcaagttaaaataaataaatgcagatacgtggtctggtcatcggatatgtcgcacttggcgcttctctccaaacataatgtgacagtttgtaatagaaaattagacgtcctgtgct

SEQ ID NO: 83 - DNA, 410 bp, Artificial Sequence
  Psylliodes chrysocephala
taagaacacatgtgagacggcaaatgctattagaaaaatgcctctcaaaagggcagtatcgtacttgaagaatgttgttgttcaaaaggaatgtattcctttcagaagattcaatggtggtgtgggtcgttgtgctcaagccaaacagttcggtaccacacagggtaggtggccgaaaaagtctgcagagtttctcttgcaactccttagaaatgcagaaagtaatgctgattacagtggacttgatgtagacaggctagtggtagaacacattcaagtgaatagggctgcttgtctgagacgtcgaacgtacagagcccatggtagaattaacccatacatgtcttctccctgtcatattgaactctggctaactgaaggcgaatctacccctgatcttcccaagaaaa

SEQ ID NO: 84 - DNA, 232 bp, Artificial Sequence
  Psylliodes chrysocephala
gtccacaagacccataaagtaacccaatacaaaaaatcgaaggaacgtcatgcttcccaaggtagaagacgttatgacaggaaacaacaaggttttggtggtcaaacgaaacctattttccgtaaaaaggctaagactaccaaaaagattgtattgaggatggaatgtactgattgcaagttcaggaaacaaattccccttaaaagatgcaaacattttgagctaggaggtg

SEQ ID NO: 85 - DNA, 715 bp, Artificial Sequence
  Psylliodes chrysocephala
cattcaagtggtcaaagacgaattagagtgacgacagtggctcgaaactgggcagatgccactactaatattcaccacatcagcgctggtttcgaccaagaagcagcagcagtaattatggccagaatggcggtttatagagctgaatctgatgagagtcccgacgttctgagatgggtcgatagaatgctgattcgattgtgtcaaaaattcggagagtacaataaagacgatgctggttcattcagattgggtcaaaactttagcctctatccgcaattcatgtatcacctaaggagatctcagttcctgcaagttttcaataattctcccgatgaaacatcgttctatcgacatatgttgatgagagaagatcttactcaatcattgatcatgattcaaccgattttgtacagctacagtttcaacggccctccagagcctgtgctgttagatacgagttccatacagcccgatagaatattgctcatggacacgtttttccaaattttgatattccacggggagactatagctcaatggagaaatttgaaatatcaagacatgcccgaatacgagaactttaggcaattattgcaagcacctgttgatgatgctcaggagatattacaaacaaggttccccatgccgagatatattgacaccgaacaaggggggtctcaggctagatttttattgtccaaagtcaatccga

SEQ ID NO: 86 - DNA, 786 bp, Artificial Sequence
  Psylliodes chrysocephala
ccaatttgaaagccttacccgaaggagctgaaataagagacggggaacgtttgccggtgtccatcaaagacatgggcgcttgcgacatttaccctcagactattcagcacaatcccaacgggcgtttcgtggtggtttgcggcgatggggagtacatcatttacaccgcaatggcgctcaggaacaaagcgttcggtagcgcgcaggagttcgtgtgggcgcaggattccagcgaatacgccatcagagagtcggggtctaccatcaggatattcaagaacttcaaagagaagaagaatttcaaatcagactttggagctgaaggcatctatggtggttatctgttgggcgtgaagtctgtatctggcttggctttctacgattgggaaactctggatttggttagaaggatcgaaatacaacctcgttcgatatactggtccgatagcggcaaactagtttgtttggccaccgaggacagttacttcatactatcttatgacgttgaagaagttcagaaagcaagagataacaaccaggtggctgatgatggagtggagtccgccttcaatctcctaggtgaagtaaacgagtcagttcgcacaggtctctgggtaggagattgcttcatttacacgaacgccgtaaaccgtataaattacttcgttggaggtgaattggtgaccatcgcgcatctcgatggcccactgtacgtactaggctacgttccgaaggacgacagactctatttagtcgacaaagaattgagagtggttagctatcagc

SEQ ID NO: 87 - DNA, 769 bp, Artificial Sequence
  Psylliodes chrysocephala
ggagccttacaatgaaatgcaattgaaaatggacctcgaaaagggcgaagtcaaagtaaagataagggctttggaaagaatcatacacatgatattggcaggcgagagattgcccaacggattcctgatgacaatcatacgaaacgttttgcccctacaagatcacctggccaagaaacttttgctcattttttgggaaatcgtgccgaaaaccacccccgacggtaaattactgcaggaaatgatcctagtctgtgacgcctacagaaaggacctgcagcaccccaacgaatttttgaggggctccacattgagattcctatgcaagctgaaggagcccgagctgttggagcctctgatgcccagcattcgaatttgcctcgaacacaggcacagctacgttcgaaggaatgccgttctggccatttttacgatatacaagaatttcgaattcctcattccagacgcccctgaattgatttctacttatctagacggcgagcaagatatgtcttgtaaaagaaacgctttccttatgcttttgcatgccgaccaagatcgagccctcacttacctatccaattgcttagatcaagtggcttcttttggggatattctacagttggttattgttgaattgatatacaaagtgtgccactccaaccccgccgagagatccagattcattcgatgcatatacaatctattaaattcgagcagtcctgctgttcggtacgaggccgccggtactctgattactctgtccagc

SEQ ID NO: 88 - DNA, 424 bp, Artificial Sequence
  Psylliodes chrysocephala
aactggaagatggaagaaccttatctgactacaatattcaaaaagaatctactctacatttggtacttcgtctcagaggagggatgcaaatattcgtgaaaactctcactggtaaaactattactcttgaagttgaaccatctgataccattgagaacgtgaaggccaaaattcaagacaaagagggtattcccccagatcagcaacgtcttatctttgccggaaagcagctggaagatggacgaacattgtccgactacaacattcagaaagaatctactctacacttggtacttcgtctaaggggtggaatgcaaatatttgttaaaactctcactggtaaaactattactctcgaagttgaaccatctgatactattgagaacgtgaaggccaaaatccaagataaagagggaatcccacc

SEQ ID NO: 89 - DNA, 406 bp, Artificial Sequence
  Psylliodes chrysocephala
gctgttcaaattgtccaacaagcttgttatggctgtatccggagagtctggcgatactacacaatttgccgagtacatagctaagaatattcagctgtacaaaatgagaaatacctacgaacttagcccatcggaagcagcttcgtttactcgtaggaatctcgctgatgctcttagaagcagaagcccttaccacgtaaatttgctgctggctggatacgacgagaaagaaggcccccaattgtactacatggactacttggcgtcgaccatcaaagttaattacgctgctcacggttacggaggcttcttttcgttgtccatcatggatagaaactacagcaaatctctgagtagagaagaaggctatgagttgttgaaaaaatgcgtgagagaagttcaaaag

SEQ ID NO: 90 - DNA, 417 bp, Artificial Sequence
  Psylliodes chrysocephala
catgacccctgaaagaaagaagaaacttaggttattgttgagaaagaaagccgccgaggaattgaagaaggaacaggaaaggaaagcggccgagaggagacgcatcatcgaagagcgctgcggaaagcccaaattgatcgatgacgccaatgaagaacaacttaagagtatttccaaaatgtatcacgagagaatttgcaagctggaagaccagaaattcgatttggaatatctagtcaaaaagaaagacatggagatcgcggaattgaacagccaagtgaacgacctcagaggaaaattcgtgaaaccgacgttgaagaaggtgtccaaatacgaaaacaaattcgccaagctgcagaagaaggccgccgaatttaacttccgcaaccaactgaaagtggtcaagaagaaggagtt

SEQ ID NO: 91 - DNA, 613 bp, Artificial Sequence
  Psylliodes chrysocephala
caagcctggaaaacctagaaattatgacttaggaaatggtgttatgaggttttcaagaacaagaatgttccataagaaggctttgtacaaatttattggtaaaaaagttaaggctaccaagaaaccacagaagcctcacgttatcgaaaagccaattaatggagaaaagaacggaggaaagagattcgtcttagtcaagaagcgtagggcttactatcctactcaagacaagattaagccgaggcctgcgaagaagtccttctgccagcacaaacgttcacttagaacaaccataacacccggtactgttcttattttgttggctggttctcacaagggtaagagggttgttttcctgaagcaactgtactctggtcttttacttgttactggtccgttttccattaatgcctgtccattgagacgtattagtcaacgatacgttatcgcaacatccaccaaaatcgatgtaagcggtattaaagttcccgacaactttaatgatgactatttcgcgagaaaacgcgtcaagagggcgaagaaagaggaaggtgacattttccagaccaagaaagtggtttacaaagcaagcgaggaaaggaaaaaggaccag

SEQ ID NO: 92 - DNA, 331 bp, Artificial Sequence
  Psylliodes chrysocephala
cagcacaggaacatccattatggcatcagaattcgacggcggagtcgtcataggagccgactcacgtacaaccactggggcctatatcgcaaacagggtgtccgacaaactaacgagagttaccgatcacatttactgctgcaggtcaggttccgctgctgatacggaggccatcgcagacatcgtaggctaccatttgaacttccacgggatggagttgggcgaagagccgagcgtagaagtgggagcggccatattcaaggagctgtgctacaactacagggactccttgatggccggcatactggtggccggttgggataagaagaaa

SEQ ID NO: 93 - DNA, 598 bp, Artificial Sequence
  Psylliodes chrysocephala
tttaccaacgtcttgcaatgggccctcggcggcgcaatctttgccctttgcctttggatgaggttcgaggagggcatccaagaatggctgcagaaattggattccgaacaattttacaacggagtttatgtacttatagtcgcttcgctgatcgtcatgattgtgtcctttctgggatgtattagtgccctacaggagaatacggtgacccttttggcctacatcggcacgcaagtgctgagcttcatattcggtttagccggttcggctgttcttctggataacagcgccagagattcccacttccagccgaggattcgggagagcatgcgacgtcttatcatgaatgctcatcacgagccatccagagtaacgctcgccatgattcaggaaaatatcggctgctgcggtgctgacggagcagaagattacttgtcgctgcaacagccattaccgagccaatgcagggacaccgtcaccggtaatccctatttccacggatgcgtcgacgagctcacgtggtttttcgaggaaaagtgcgcctggatagccgcattggccatgtgcatttgcttctttaacgtttttagcatcgtgc

SEQ ID NO: 94 - DNA, 722 bp, Artificial Sequence
  Psylliodes chrysocephala
gttagtatttgccacactgctacagtcattgctaacgctttcatgcacagcggtaccaccagcgaccaatttttaagggataatttggaatggctagccagagcaacgaattgggcgaagctaacagcaacagcgtctctgggcgtcatccatcgagggcacgagcaagaggctttgactctcatgcaaagctatttgccgaaggaagttgggccgagttcgggatactccgaaggcggcggtttgtacgctctcggtctcattcacgccaatcacggtgctaacataatcgattaccttcttggtcaactcaaagacgcccagaacgagatggttagacacggcggttgtttgggcctcggtttggctgctatgggctcgcagaggcaggatgtgtacgaacagctcaagttcaatctctatcaggacgacgctaatactggagaggctgccggaatcgcgatgggtatggttatgttgggatccagtaatccaactactattatggatatggtagcgtacgcacaagagagccagcacgaaaaaatccttcgcggcttggctgtcggcataagtttcaccatgtacggtcgattagaagaagctgataccttgatacaacagcttacttccgataaggatcccatcctgagaagatccggcatgtacacattagctatggcttattgcggtacagggcataaccaggcgattaggaaatt

SEQ ID NO: 95 - DNA, 206 bp, Artificial Sequence
  Psylliodes chrysocephala
aaatgtcaaggcgaaaatccaagacaaagagggaattcctcctgaccagcagcgattgattttcgcaggtaaacaactcgaagatggccgtaccctttcagattacaacatccaaaaggagtccaccctccacttggtgctgcgtttgagaggaggaatcatcgagccctctctgcgtctgttggcccaaaagtacaattgcgaca

SEQ ID NO: 96 - DNA, 726 bp, Artificial Sequence
  Psylliodes chrysocephala
aagaagaagattccggcaatgattttccctacttcgatttcatcgagtcctgtttgaggcacaaatccgagatggtagtttacgaagcagcccacgcgatcgtcaatctcaagcgaacgactagcaaagaattggcgccggctgtgagcgtattacaactgttctgcggctcgccgaaggctactttgagattcgccgccgtcaggactctgaatcaagtggccatatcccatccggccgctgtgaccgcttgcaatttggatttggagaatttgattaccgattctaatcgatcgattgccacgcttgctatcactactttattgaaaactggtgctgaatcgtctgttgatcgactcatgaagcaaatagcgagtttcgtatctgaaataagcgatgaattcaaagttgtggtggtccaagcgatcagagcactggctcttaaattccctcgtaagcacaacactctcatgaacttcttatcggctatgctgagagacgaaggtggtttggaatacaaagcctccattgcagacaccataatcactattatcgaagataatcctgaagctaaggaatcaggtctggctcatctgtgcgagtttattgaagattgcgaacacgtttctctagctgttagaatattgcatctgctaggtagggaaggaccgaaaaccaaacaaccttctaggtacattcgtttcatctacaaccgggtcatcttag

SEQ ID NO: 97 - DNA, 315 bp, Artificial Sequence
  Psylliodes chrysocephala
tccaaagaaccatgttggaactgttgaaccaactggacggtttcagctccacttccgacatcaaagtcatagcagctacgaatcgtgtggatattctggatcccgctctgcttcggtctggtcggttggacaggaagatcgaattcccgcatcccaacgaagaggcgagggcgagaatcatgcagattcactccaggaaaatgacggtcaacccggacgtgaacttcgaggaattggctagatctacggacgacttcaacggggctcagtgtaaggctgtgtgcgtcgaagctggtatgatcgctctcagacgta

SEQ ID NO: 98 - DNA, 455 bp, Artificial Sequence
  Psylliodes chrysocephala
gctatccaaaagcttagggaaaccgaggaaatgttatataaaaaacaagagtttttagaaaagaaaatagaggaatacacattagtagccaaaaagaatgcatcaaaaaataaaagagttgcgctccaagcgctcaaaaagaaaaaacgactggaaaaaactcaattacaaatcgatggaacactcactaccatcgaaatgcaaagggaggccctcgaaggggccagcaccaacacagccgtcttagactccatgaagaatgctgctgaagccctacagaaagcccacaaaaacttgaatgtcgatgatgtccatgatatcatggatgacatagctgaacagcacgacattgccaacgagatcactactgctattagccagccggttggcttcaacgatgatctagacgaggacgaattagaaagcgaactagagaagctcgaacaagaaggatt

SEQ ID NO: 99 - DNA, 440 bp, Artificial Sequence
  Psylliodes chrysocephala
gctattgagatttgcggatgatacttatacggagagttatattagtactattggagtagattttaaaatcagaacaatcgatttagatgggaaaacaattaaattgcaaatttgggataccgccggacaggaacgatttagaactataacatcgagttactacaggggcgcgcacggaatcatcgtcgtgtacgattgcacagaccaggactccttcaataacgtgaaacaatggttggaggaaatcgaccgttacgcatgcgacaacgtcaataaattacttgtagggaataaaagcgatcttacgactaagaaagttgtcgatttcaacacggccaaggaatacgcggatcagttgggcataccgttcttggagacatcggcgaagaacgccaccaacgtagagcaggcctttatgacgatggcagcggaaattaaaa

SEQ ID NO: 100 - DNA, 170 bp, Artificial Sequence
  Psylliodes chrysocephala
aataagcaggatttggccaacaagcggatggtggagtacgaggaggcgcagacctacgccgatgaaaacggtttgctgttcatggaaacatcggcgaaaacggcgatgaacgttaacgatatatttttagcaatagctaagaaactgcccaaaaacgaacaaacatccgg

SEQ ID NO: 101 - DNA, 406 bp, Artificial Sequence
  Psylliodes chrysocephala
atggtaggtttagatgctgctggtaaaaccacaattttatataaactaaaattaggagaaattgtaacaactatcccaactattggttttaatgtcgagactgtagaatataagaatatcagctttaccgtttgggatgtcggtggtcaagataaaattaggccattgtggagacactatttccaaaatacccagggcctaatcttcgtagtggacagcaacgacagggagcgtatcaccgaggccaaagacgagctgatgcgtatgctggccgaagacgagctcagggacgccgttctcctgatattcgccaacaagcaggatttgccgaacgccatgaacgccgccgaaatcaccgataagctcgggctacattcgttgcgcaaccgtaactggtacatacagg

SEQ ID NO: 102 - DNA, 738 bp, Artificial Sequence
  Psylliodes chrysocephala
ttgaggagttgattggtctgttggaagccgccttggggttggagagggcccacatggggatgttcaccgaactggctatattgtattcgaaatacaaaccggctaggatgcgcgaacatctcgaattgttctggtcgcgcgttaacatccctaaagtgctcagagcagccgaacaggcgcatctgtgggctgaattggtgttcctgttcgacaaatacgaagagtacgataacgccgtgctggccatgatgacgcatcccaccgaggcgtggcgcgaggggcacttcaaagacatcatcacgaaagtggcgaatatcgaattgtactacaaggcgatccaattttacctggatttcaagccgctgttgttgaacgacctgctgctggtgctggcccctagaatggatcacaccagggccgtggctttcttcaccaaaaccggccacctgcagctggtcaaatcctacctacggtctgtccaaaatttgaacaataaagcgatcaacgaggctctgaattctctgctgatagaggaagaggacttccaggggctcagaacatccatagacgcgttcgataactttgataacataggtttagcccagagattagaaaagcacgaattaaccgaatttagacgcatcgccgcttatctgtataaaggaaacaaccggtggaagcagagcgtggaattgtgcaagaaagacaggctgttcagggacgccatggaatatactt

SEQ ID NO: 103 - DNA, 793 bp, Artificial Sequence
  Psylliodes chrysocephala
tgaccagaccatcaggatatggaactggcaatccaggacgtgcatttgcgttctaacgggccacaatcactacgttatgtgcgccacttttcatccgagcgaagatttattgttatcagcttcgttggattctactgttagagtttgggatatttcgggactgcgtaagaagaatgtatcacccggtccctcgggcctcgaagatcacctcaagaatcctggtgctactgagctattcggccaagccgatgcagtagtaaagcatgttttggaaggacacgatcgaggagtgaactgggcttcattccatcccttcctacctctaatagcttctggagctgatgataggcaaataaagctgtggaggatgaacgattcgaaagcttgggaagtggatacttgtaggggccattacaacaacgtgtcttgcgtgttgtttcatccgagacaggagctgattctgtctaacggcgaggatcggagcataagggtgtgggatatgtcgaagaggacttgcttgcatacttttagaagggaacacgagagattttgggttatgacgagccacccgaatttgaatttattcgccgctggtcacgacggcggtatggtaatatttaaattggaaagagaacgaccagcttacacagtacacggcaacctactgtattacgttaaggaaaagtacttgagaaaactcgatttcaccacgtccaaggatgtccctgttatccaaatcagaggcggcggtaaaatcccggtatacagaatgtcctttaatcctgccgaaaac

SEQ ID NO: 104 - DNA, 279 bp, Artificial Sequence
  Psylliodes chrysocephala
cttcgagtccacttcaagaatacctgcgagaccgcgaacgccataaggaagatgcccctcaaaagggccgtagcctacctgaagaacgtagtcgtgcaaaaagagtgtattccatttaggagatttaacggaggagtcggccgttgtgcccaagccaagcaattcggcacgacgcagggtagatggcccaagaagtccgcggaatttctactacagctcctcaggaacgccgaaagcaacgcagattacagcgggcttgatgtcgataggctagtcgta

SEQ ID NO: 105 - DNA, 143 bp, Artificial Sequence
  Psylliodes chrysocephala
acgcagtacaagaaatccaaagaacgtcacgcttcgcagggtagaaggcgttatgacaggaaacagcagggtttcggtggtcaaactaaacccattttcaggaagaaggcaaaaaccaccaagaaaatcgtgttgaggatgga

SEQ ID NO: 106 - DNA, 747 bp, Artificial Sequence
  Psylliodes chrysocephala
ccgagatggtatccgttttacgtggaacgtgtggccttccagtaggatcgaggccacccgcttggtggtaccattagcctgtctgtatcagcctctcaaagaaagagtagatcttcctcccattcaatatgatcctgtattgtgcacaagaaacaactgcagggctattttaaatccactgtgtcaagtcgactatcgagctaaattatgggtttgcaacttctgcttccaaagaaatccatttcctcaacaatatgcagctatctccgaacaacatcaacctgctgaattaatgcctatgttctcgactctcgagtacacgattaacagagttcaatgtctgcctcccatattcttgtatgttgtggatacttgcatggatgaggaagaattgggttcgctaaaggactccttgcaaatgtcgttgagtttgttacctcaaaacgctttgattggcctgattacatttggaaaaatggttcaagttcacgaattaggcaccgaaggtgtcagcaaatcttacgtgttccgaggcactaaagatcttacggctaaacaggttcaggaaatgttgggtatcggtaaagtcgcaatgactcaacaacaacaacctcaacaaccggggcaacctatgagacctggacaacctcaatctgcacctgtcccgcctggtagcagattcctgcaacctatttctaaatgtgatatgaatctaacagatttaattggagaacaacagaaagatcc

SEQ ID NO: 107 - DNA, 620 bp, Artificial Sequence
  Psylliodes chrysocephala
cgggatccaccatcagaatattcaagaacttcaaggagaagaagaatttcaaatcggactttggagccgaaggcatctacggtggttatctgttgggcgtgaagtctgtatccggattggcgttctacgattgggaaactctggatttggttaggaggatcgaaatacaacctcgctcgatatactggtctgatagcggtaaactggtttgtttggccaccgaggacagttatttcatcctatcttacgatgtcgaagaagttcaaaaagcaagggataacaaccaggtggctgatgatggagtggaatccgcgttcaatctcctaggggaagtgaacgagtccgttcgaacgggtctttgggtaggagattgcttcatttacacgaacgctgtaaaccgcatcaactacttcgtcggaggtgaattggtgaccatcgcgcatctggatgggccgttgtacgtgctgggctacgttcccaaagacgatagactctatttagtcgacaaagaattgagagtggtcagctatcagttgctcctttcggtcttggagtaccaaacagccgtaatgagaagagatttctcgacggccgacagagtgttgccttcgattcccaag

SEQ ID NO: 108 - DNA, 747 bp, Artificial Sequence
  Psylliodes chrysocephala
acttacctagatggcgaacaagacatgtcttgtaaaaggaacgcttttcttatgctcttgcacgccgatcaagatcgagccctcacttatctatccaattgtttagatcaagtcgcttccttcggggatatccttcagttggttatcgtcgaattgatatacaaggtgtgccactctaaccccaccgagagatccagattcattcgatgcatatacaatctgttaaattcgagcagtcctgctgttagatacgaagcggcaggtactctcattactttgtccagcgctccgactgctataaaagccgccgccagttgttacatcgaattgatcattaaagagagcgacaacaacgtcaaattgatcgttttggatagattgatcgcgttgaaggaacatccgagccacgagagagtcctacaggacttggttatggatatattgagagtgttatcggctcccgatttggaggtgcgaaagaaaacgcttaatttagcgctcgaattggtgtcctctcgtaacgtcgaagaaatggtgtttgtgctgaagaaggaggtgtcgaagaccatggatagcgaacacgaagataccgggaaatacaggcaactgttggtcagaacgttgcattcttgttgcatcaaattccccgatatagctgctacggtcattcccgttctaatggagttcctgtccgatagcaacgaattggcggccaccgatgtgttgctatttctgagggaagccata

SEQ ID NO: 109 - DNA, 741 bp, Artificial Sequence
  Psylliodes chrysocephala
caactggaagatggtcgcactctttctgattacaacatccagaaagaatctactcttcacttggttttgagacttcgtggtggaatgcagatctttgtaaaaactttaactggaaagaccatcaccttggaagtcgagccatccgacaccattgagaatgtaaaagctaaaatccaggacaaggaaggtatcccaccagaccagcagagattgatcttcgcaggaaaacaactagaagatggtcgtactctttctgattacaacatccaaaaggaatctactcttcacttggtacttagacttcgtggtggaatgcaaatcttcgttaaaactcttactggaaagaccatcactcttgaagttgaaccttctgacactattgagaatgtcaaagccaagatccaggacaaggagggaattcccccagaccaacaacgtttgatcttcgccggtaaacaattagaagatggccgtactctttctgattacaacatccaaaaggaatctactctccacttggtacttagacttcgtggaggaatgcaaatcttcgttaaaactttaactggaaaaactatcaccttggaagtcgagccatccgacaccattgagaatgtcaaagctaaaatccaggacaaggaaggtatcccaccagaccaacaacgtttgatcttcgctggaaaacaactagaagatggtcgtactctttctgactacaacatccagaaggaatctactctt

SEQ ID NO: 110 - DNA, 553 bp, Artificial Sequence
  Psylliodes chrysocephala
aattcgacgatttcgttttagttgctgccgatatgactgcggcccaaagcataattgttatgaaaacagacgaaaataagctgttcaaattgtccaacaagcttgttatggctgtatccggcgagtctggtgatactacccaatttgcggagtacatcgccaagaatattcagttgtataaaatgagaaacacctacgaacttagcccatcagaggcggcttcgttcactcgtaggaatctcgccgatgcccttagaagcagaagtccttatcacgtaaatttgctactggctggatacgacgagaaagaaggccctcaattatactacatggactacttggcgtcgaccatcaaagttaattacgctgctcacggttacggaggcttcttctcgttgtctatcatggatagaaactacagcaaatctctaagcagagaagaaggttacgagttgctaaaaaaatgcgtgaaagaagttcagaaaagattaatcatcaatttacctaactttaaggtacagtgcgtcggcaaagatggtatcacagatttgcc

SEQ ID NO: 111 - DNA, 410 bp, Artificial Sequence
  Psylliodes chrysocephala
cgaagaaggccaagaaaggtttcatgacccccgaaagaaagaagaaacttaggttactgttgagaaagaaagccgccgaggaactgaagaaggagcaggaaaggaaagcggccgaaaggagacgcatcatcgaagagcgctgcggaaagcccaaactgatcgatgacgccaatgaaggccaacttaagaagatttgcaaagactattatgaccgcatgtatatatgtgaggagcagaaatgggatttggaacgcgaagttcgaaaacgggactgggagatctcggaattgaacagtcaagtgaacgacctcagaggaaaattcgtgaaaccgacgttgaagaaggtgtccaaatacgaaaacaaattcgccaagttgcagaagaaggccgccgaatttaacttccgcaac

SEQ ID NO: 112 - DNA, 700 bp, Artificial Sequence
  Psylliodes chrysocephala
agcctggaaaacctagaaattatgatttaggaaatggcgttatgaggttttcaagaaccaagatgttccacaagaaggctttatataaatttattggtaaaaaagttaaggctaccaagaaaccacagaagcctcacgttatcgaaaagccaattaacggagaaaagaacggaggaaagagattcgtcttagtcaagaaacgtagggcttactatcctactcaagacaagattaagccgaggcctgcgaagaaatccttctgccagcacaaacgttcgctcagaactaccataacacccggtactgttctaattttgttggccggttcccacaagggtaagagggtcgttttccttaaacaactgtactctggccttctactcgtaactggaccgttttccattaatgcctgtccgttgagacgtgttagccaacgatacgttatcgctacatctaccaaaatcgatgttagcggtattaaagttcccgacacctttaacgacgactatttcgcgaggaaacgcgtcaagagggcgaagaaggaagaaggtgacattttccaaaccaagaaagaggtttacaaagtaagtgaggaaaggaaaaaggaccagacggaaatcgacacgcaggtgatggctgcgatcaaaaaacaccctgaccgtaaagttctccaagcttatttatcagctatgtggggttt

SEQ ID NO: 113 - DNA, 589 bp, Artificial Sequence
  Psylliodes chrysocephala
gtaaacaccgattttatgccacaagatggttcgaatgattggagggacgctgctcacagtacaggaacttccattatggcatctgaattcgacggtggggttgtcattggagccgattcacgtacaaccacaggggcttacatcgcaaacagggtgtccgataaactaacgagagtaaccgatcacatttactgctgccggtccggttcagctgctgatacagaggccatcgccgacatcgtaggctaccatttgaacttccacgggatggaactgggcgaagagccgagcgtggaagtgggagcggccatattcaaggagctgtgttacaactacagggactccttgatggccgggatactcgtggccggctgggataagaagaaagggggccagatatattcgataccgatcggggggatgtgcgtgagacaggaggtgtctatcggtgggtccggttcgagctacgtgtacggttacatggacgccaattacaagccgaaaatgtctaaagaggattgcgttaaattcgtaactaatactttggctcttgcgatgtctagagatggttcatctggtggtgtaatca

SEQ ID NO: 114 - DNA, 319 bp, Artificial Sequence
  Psylliodes chrysocephala
tgatactcttcgccaacgtcttgcaatgggccctcgccggcgcaatctttgccctttgcctttggctgaggttcgaggagggcatccaagaatggctgcagaaattggattccgaacaattttacaacggagtttatgtacttatagtcgcttcgctgatcgtcatgattgtgtcctttctgggatgtattagtgccctgcaggagaatacggtgacccttttggcctacatcggcacgcaagtgctgagcttcatattcggtttagccgggccggctgttcttctggataacagcgccagagattcccacttccagcc

SEQ ID NO: 115 - DNA, 775 bp, Artificial Sequence
  Psylliodes chrysocephala
atcacgcaagccgacgatattatcagcatgctcacctacgctttccaagtggcgatgagcctgatccagaatcgagcgtttcgcaacaccgtgttgagatcgttagtaggcctgtatcgcggcttgactaccccggactacgtcaacatgtgccaatgtctgatctttttggatgatgcgctagcggtggcggaaattttagataaattagtgtccggcaaggaagagtccgaattgatggcttaccaaatagcattcgatctctacgagtccgcaacgcaacagtttctggagagagttttggtcgcgcttagagctacagctcccataccttcgctgttagaggaaaaggttaaatctaaaaccgccgaaacatctagcagcacttcagcagagtctggcagcaaagatcctgtcgtcggtgaaactaaaagcgaggcgaaagaagaaaaatctatcgagggtttgactgaaagtgaaaaggaacaccaaaaacgaatcgaaaaattgcacaccatcttatccggcgaagtatctatagaactccatcttcagtttctcattagatccaaccacgccgatcttcttattctgaagcaaacgaaagaaacggttcgagttggtatttgccacactgctacagtgattgctaacgctttcatgcacagcggtactaccagtgaccaatttttaagggataatttggaatggctagccagagcgacgaattgggcgaaacttacagccacagcctccctgggtgtcatccatcgtg

SEQ ID NO: 116 - DNA, 302 bp, Artificial Sequence
  Psylliodes chrysocephala
aaaatccaggataaggaaggaattcccccagaccagcagcgattgatcttcgccggtaaacaactggaagacggccgtaccctttcagattacaacatccaaaaggagtctaccctccacttggtgctgcgtttgagaggaggaatcatcgagccctctctgcgtctgttggcccaaaagtacaattgcgacaagatgatttgccgcaaatgctacgccaggttacatccgagagccaccaattgcaggaaaaccaagtgtggacacaccaacaacttgcgccccaagaagaagctgaagta

SEQ ID NO: 117 - DNA, 655 bp, Artificial Sequence
  Psylliodes chrysocephala
cgaacacgtttctttagctgttagaatactgcatctgcttggtagagaaggaccgaaaaccaaacaaccttccagatacatccgtttcatttacaaccgcgtcatcttagagtgcccttccataagagcagccgctgtctctgccatggcccaattcggagcttcgtgtcccgatttgttagaaaatattcaagtattactagccagatgccaaatggactctgacgatgaagtcagagacagagctacttattacagcagcatacttagcaaaaacgataaaaacttgtacaacaactttatccttgatacgttacaggtatctataccggggttagaacgctcgttgaaggagtacacgcagaactctacgaatcaaccgttcgatataaaatcagtgccgctgcaagtgggcccgtctccggacgagcgcgagaagaagcacaaatccgaaggcatgctgtcgtcgcaggggcccctgcgaccgccgcccgtctcgcgcgaggagaacttcgcggagaaactgtcggccataccgggcatccagcagctcggtccgatcttcaagagctccgacgtggtggagctgaccgaatccgagacggagtacttcgtgcggtgcatcaagcactgcttcgcccatcacgtggtgttg

SEQ ID NO: 118 - DNA, 720 bp, Artificial Sequence
  Psylliodes chrysocephala
tcgaggctgttgtactacctatgactcataaagacaagttcgttaacttgggaattcatcctcccaaaggtgttctcctttacggtcccccgggtaccggtaaaaccctcctagccagagcctgcgccgcccaaaccaaatcaactttcctcaaactggccggtcctcagttagtccagatgttcataggcgacggcgccaagttagtccgagacgccttcgccttggccaaagagaaggcacccgctataatattcatcgacgagctggacgccatcggtacgaagcgattcgactcggagaaagccggagaccgggaggtccaacgaaccatgttggaactgctcaaccaactggacggcttcagctcgacatccgacatcaaagtcatagcggctacgaatcgcgtggatattctggatcccgccctgctgcggtccggaaggttggaccggaagatcgagttcccgcatcccaacgaagaggcgcgagcgagaatcatgcagattcactccagaaaaatgacggttaacccggacgtgaacttcgaggaattggccaggtctactgatgacttcaatggggcccagtgtaaggctgtgtgtgtcgaagctggaatgatcgctctcagacgtaacgccactgctgtgactcacgaggactacatggatgctattatggaagttcaagctaagaaaaaggcgaatctgaattattacg

SEQ ID NO: 119 - DNA, 560 bp, Artificial Sequence
  Psylliodes chrysocephala
aaaagaaaaggatacgggtcccacgcccggagaagctatccaaaagctcagggaaaccgaggacatgttatataaaaaacaagagtttttagaaaagaaaatagaggaatacacattaatagccaaaaagaatgcatcaaagaacaagagagttgctttgcaagcgctcaaaaagaaaaaacgcttggaaaaaacccaattacaaatcgatggaacactcactaccattgaaatgcaaagggaagccctcgaaggagccagtaccaacacagccgtcttagattccatgaagaatgctgctgaagccctacagaaagcccacaaaaacttgaatgttgatgatgtccatgatatcatggatgacatagctgaacagcacgatattgctaatgagattactactgctattagccagccggttggcttcaatgatgatctggatgaggatgaattagaaagtgaactagaaaagcttgaacaagaaggattagaggaagatttgctgaaagtgcctggtcctactgaattacctgctgtacctacaggagctatcgctaagc

SEQ ID NO: 120 - DNA, 562 bp, Artificial Sequence
  Psylliodes chrysocephala
attcaagctgcttcttatcggcgattctggagtaggaaaatcgtgtttgctattgagatttgcggatgatacttacacggagagttatattagtactattggagtagattttaaaatcagaacaatcgacttagatggaaaaacaattaaattgcaaatttgggataccgccggacaggaaagatttagaactataacatcgagttactacaggggcgcgcacggaatcatcgtcgtgtacgattgcacagatcaggactcgttcaacaacgtgaaacaatggttggaggaaatcgaccgttacgcatgcgacaacgtcaataaattacttgtaggaaataaaagtgatcttacgactaagaaagttgtcgatttcaatacggccaaggaatacgcggatcagttgggcgtaccgtttttggagacgtcggcgaagaacgccaccaacgtagagcaggcctttatgacgatggcggcggaaattaaaaatcgattagggccgccgaccgcggccgcggatcaaggaaacaaagttagattcgatcaaagtcgtcctgttgaa

SEQ ID NO: 121 - DNA, 587 bp, Artificial Sequence
  Psylliodes chrysocephala
agttcaaattggtgttgctcggcgagagcgccgtcggtaaatccagtctggtgctgaggttcgtcaagggccagttccacgagtaccaggagagcaccatcggggccgcctttctcacccaaactatctgcttggacgacaccaccgttaaattcgaaatatgggacaccgcgggacaagaaaggtatcacagtttagctccgatgtactacagaggggcgcaggcagctatagtggtgtacgacataaccaatcaagatacgttcggcagagcgaaaacgtgggtgaaggaactccagaggcaggccagtccgacgatcgtgatagccctagccggcaacaagcaggatttggctaacaagcggatggtggagtacgaggaggcccaaacctacgccgatgagaacggtttgcttttcatggaaacatcggcgaaaacggcgatgaacgttaacgatatatttttagcaatagctaagaaactgcccaaaaacgaacaaacatccggtcaggggggcagcgcccaaggcaggcgattggcagaaggagatgcgggcgccaaggccccgggaaactgctgcaagtga

SEQ ID NO: 122 - DNA, 449 bp, Artificial Sequence
  Psylliodes chrysocephala
gtaggtttagatgctgctggtaaaaccacaattttatataaactaaaattaggagaaattgtaacaaccatcccaactattggttttaatgtcgagactgtagaatataagaatatcagctttactgtgtgggatgtcggtggtcaggataaaattaggccattgtggagacactattttcaaaatacgcagggcctaatcttcgtagtcgacagcaacgacagggagcgtatcaccgaggccaaagacgagctgatgcgcatgctggccgaagacgagctccgggacgccgttcttttgatattcgccaacaagcaggatttgccgaacgccatgaacgccgccgaaatcaccgataagctcggattacattcgttgcgcaaccgtaactggtacatacaggccacgtgcgccaccagcggagacggtctctacgaaggtctcgattg

SEQ ID NO: 123 - DNA, 735 bp, Artificial Sequence
  Psylliodes chrysocephala
ttcaccgaactggctatattgtattcgaaatataaaccggctaggatgcgcgaacatctcgaattgttctggtcgcgcgttaatattcccaaagtgcttagagccgccgaacaggcgcatctgtgggccgaattggtgtttctgttcgacaaatacgaagagtacgacaacgccgtcttggcgatgatgatgcatccgacggaggcgtggcgcgagggccatttcaaagacatcatcacgaaagtggcgaacatcgaattgtactacaaggcgattcaattctatctcgatttcaagccgctgttgttgaacgatcttctgttggtgctggctccgagaatggatcacactagagccgtggctttcttcagtaaaaccggccacttacagctggttaaatcttacttacgatctgtccaaaatttgaacaataaagcgatcaacgaggctctcaattctctgcttatagaggaagaagacttccaggggctcagaacatccatagacgcgttcgataacttcgataacataggtttagcgcagagattagaaaagcacgaattaaccgaatttagacgcatcgccgcttacctatacaaaggcaacaaccggtggaaacagagcgtggaattgtgcaaaaaagacaggctgtttagagacgccatggaatacacgtcggaatcgagaaaccaagaattggccgaggaactgctcgcttggttcttggacagaaag

SEQ ID NO: 124 - DNA, 773 bp, Artificial Sequence
  Psylliodes chrysocephala
aaaacgaagtcaccaagaaagtccaaacgcccacttgcgatgaagttttttacgcaggcacgggcatgctgttgttgagagactccgaacacgttacgttgttcgatgtccagcaaaagaggactttggctcaagttaaaatcagcaaatgcagatacgtcgtttggtcatctgatatgtcgcatctggcccttttatctaagcataacgtgacgatttgcaatagaaaattggatgttttgtgctcgttgcacgagaataccagagttaagtcgggtgcttgggatgacagcggagtgtttatttacactactagtaatcatattaaatatacattgaaaaatggtgatcacggaattattagaacgctcgatcttcccatttacataactagagtaaaaggtagccaggtgttctgtttggacagggaatgtaagcctcgcttattagtaatcgatcccaccgaatacaaatttaaactcgcgttgatcaatcacaagtacgaggaagttttgtacatggtcagaaactctcgattggtaggccaaagtattatatcctacttgcaacaaaaaggatatccggaagtagctttgcattttgtgaaagatgataaaactagatttgctctggctttggaatgcggaaacatcgaaatcgcattagaggccgctaaagctctaaacgataaaaattgttgggatcaattggcgcaagccgccttgtggcaaggcaaccaccaaatcgtagaaatgtgctatcaacgtacgaag

SEQ ID NO: 125 - DNA, 466 bp, Artificial Sequence
  Psylliodes chrysocephala
aacctcagagtccacttcaagaatacgtgcgagaccgcgaacgccataaggaagatgcccctcaagcgggcagtggcctatttgaagaacgtagtcgtccaaaaagagtgtattccattcaggaggttcaacggaggagtaggccgttgtgcccaagccaagcaattcggcaccacacagggaaggtggcccaagaagtcagccgaattcctgttacagctcctcaggaacgccgagagcaacgcagattacagcgggcttgatgtcgataggctagtcgtagaacacattcaagttaaccgagctgcttgtttgagacgtcgtacgtacagggctcacggtaggatcaatccgtacatgtcatcgccctgtcacatcgaactctggttaaccgagggagaatcgtcacctgaggctcctaagaagagcaacaaaaagaaggcaacggagaagaagagacccaagt

SEQ ID NO: 126 - DNA, 216 bp, Artificial Sequence
  Psylliodes chrysocephala
gcagtacaagaaatccaaggaacgtcacgctgcgcagggtagaaggcgttatgacagaaaacagcagggtttcggtggtcaaactaaacctattttcaggaagaaggcaaaaaccaccaagaaaatcgtgttgaggatggagtgtgcagattgcaagtacagaaagcagttccctttgaagagatgcaagcacttcgaacttggaggtgacaagaa

SEQ ID NO: 127 - DNA, 24 bp, Psylliodes chrysocephala
ggaaatacggtgcaatggaaaatg

SEQ ID NO: 128 - DNA, 20 bp, Psylliodes chrysocephala
aaaaattggattgtcagtgg

SEQ ID NO: 129 - DNA, 20 bp, Psylliodes chrysocephala
tgtcagatatgaagctgctg

SEQ ID NO: 130 - DNA, 20 bp, Psylliodes chrysocephala
ggaagcctccgatactattg

SEQ ID NO: 131 - DNA, 20 bp, Psylliodes chrysocephala
gcacaaagcgttatcgttat

SEQ ID NO: 132 - DNA, 22 bp, Psylliodes chrysocephala
aggcctctaaagcaaagaaggc

SEQ ID NO: 133 - DNA, 20 bp, Psylliodes chrysocephala
tctcgaaccaagatgtttca

SEQ ID NO: 134 - DNA, 19 bp, Psylliodes chrysocephala
cccacagtactggaacttc

SEQ ID NO: 135 - DNA, 20 bp, Psylliodes chrysocephala
ttagaaaatcagattgccgt

SEQ ID NO: 136 - DNA, 20 bp, Psylliodes chrysocephala
cgtcctgaggtctctagttg

SEQ ID NO: 137 - DNA, 20 bp, Psylliodes chrysocephala
caaagatccaggacaaggaa

SEQ ID NO: 138 - DNA, 20 bp, Psylliodes chrysocephala
tgtcaatctcaaacgtacca

SEQ ID NO: 139 - DNA, 20 bp, Psylliodes chrysocephala
ctatggaggtggatgagaga

SEQ ID NO: 140 - DNA, 25 bp, Psylliodes chrysocephala
acacattattagctaagaaaaatgc

SEQ ID NO: 141 - DNA, 20 bp, Psylliodes chrysocephala
tgcagatgatacttacacgg

SEQ ID NO: 142 - DNA, 20 bp, Psylliodes chrysocephala
agatctgtcagttcaagctc

SEQ ID NO: 143 - DNA, 20 bp, Psylliodes chrysocephala
gtaggtttagatgctgctgg

SEQ ID NO: 144 - DNA, 30 bp, Psylliodes chrysocephala
  misc_feature (1)..(30): n is a, c, g, or t
nnnnnnnnnnnnnnnnnnnnnnnnnnnnnn

SEQ ID NO: 145 - DNA, 20 bp, Psylliodes chrysocephala
aacatgaacgtttttgggtc

SEQ ID NO: 146 - DNA, 20 bp, Psylliodes chrysocephala
taagaacacatgtgagacgg

SEQ ID NO: 147 - DNA, 20 bp, Psylliodes chrysocephala
gtccacaagacccataaagt

SEQ ID NO: 148 - DNA, 20 bp, Phyllotreta nemorum
cattcaagtggtcaaagacg

SEQ ID NO: 149 - DNA, 20 bp, Phyllotreta nemorum
ccaatttgaaagccttaccc

SEQ ID NO: 150 - DNA, 20 bp, Phyllotreta nemorum
ggagccttacaatgaaatgc

SEQ ID NO: 151 - DNA, 20 bp, Phyllotreta nemorum
aactggaagatggaagaacc

SEQ ID NO: 152 - DNA, 20 bp, Phyllotreta nemorum
gctgttcaaattgtccaaca

SEQ ID NO: 153 - DNA, 20 bp, Phyllotreta nemorum
catgacccctgaaagaaaga

SEQ ID NO: 154 - DNA, 20 bp, Phyllotreta nemorum
caagcctggaaaacctagaa

SEQ ID NO: 155 - DNA, 20 bp, Phyllotreta nemorum
cagcacaggaacatccatta

SEQ ID NO: 156 - DNA, 20 bp, Phyllotreta nemorum
tttaccaacgtcttgcaatg

SEQ ID NO: 157 - DNA, 20 bp, Phyllotreta nemorum
gttagtatttgccacactgc

SEQ ID NO: 158 - DNA, 20 bp, Phyllotreta nemorum
aaatgtcaaggcgaaaatcc

SEQ ID NO: 159 - DNA, 20 bp, Phyllotreta nemorum
aagaagaagattccggcaat

SEQ ID NO: 160 - DNA, 20 bp, Phyllotreta nemorum
tccaaagaaccatgttggaa

SEQ ID NO: 161 - DNA, 20 bp, Phyllotreta nemorum
gctatccaaaagcttaggga

SEQ ID NO: 162 - DNA, 20 bp, Phyllotreta nemorum
gctattgagatttgcggatg

SEQ ID NO: 163 - DNA, 20 bp, Phyllotreta nemorum
aataagcaggatttggccaa

SEQ ID NO: 164 - DNA, 20 bp, Phyllotreta nemorum
atggtaggtttagatgctgc

SEQ ID NO: 165 - DNA, 20 bp, Phyllotreta nemorum
ttgaggagttgattggtctg

SEQ ID NO: 166 - DNA, 20 bp, Phyllotreta nemorum
tgaccagaccatcaggatat

SEQ ID NO: 167 - DNA, 20 bp, Phyllotreta nemorum
cttcgagtccacttcaagaa

SEQ ID NO: 168 - DNA, 20 bp, Phyllotreta nemorum
acgcagtacaagaaatccaa

SEQ ID NO: 169 - DNA, 21 bp, Phyllotreta striolata
ccgagatggtatccgttttac

SEQ ID NO: 170 - DNA, 22 bp, Phyllotreta striolata
cgggatccaccatcagaatatt

SEQ ID NO: 171 - DNA, 20 bp, Phyllotreta striolata
acttacctagatggcgaaca

SEQ ID NO: 172 - DNA, 20 bp, Phyllotreta striolata
caactggaagatggtcgcac

SEQ ID NO: 173 - DNA, 20 bp, Phyllotreta striolata
aattcgacgatttcgtttta

SEQ ID NO: 174 - DNA, 20 bp, Phyllotreta striolata
cgaagaaggccaagaaaggt

SEQ ID NO: 175 - DNA, 20 bp, Phyllotreta striolata
agcctggaaaacctagaaat

SEQ ID NO: 176 - DNA, 20 bp, Phyllotreta striolata
gtaaacaccgattttatgcc

SEQ ID NO: 177 - DNA, 21 bp, Phyllotreta striolata
tgatactcttcgccaacgtct

SEQ ID NO: 178 - DNA, 20 bp, Phyllotreta striolata
atcacgcaagccgacgatat

SEQ ID NO: 179 - DNA, 20 bp, Phyllotreta striolata
aaaatccaggataaggaagg

SEQ ID NO: 180 - DNA, 31 bp, Phyllotreta striolata
cgaacacgtttctttagctgttagaatactg

SEQ ID NO: 181 - DNA, 20 bp, Phyllotreta striolata
tcgaggctgttgtactacct

SEQ ID NO: 182 - DNA, 20 bp, Phyllotreta striolata
aaaagaaaaggatacgggtc

SEQ ID NO: 183 - DNA, 20 bp, Phyllotreta striolata
attcaagctgcttcttatcg

SEQ ID NO: 184 - DNA, 20 bp, Phyllotreta striolata
agttcaaattggtgttgctc

SEQ ID NO: 185 - DNA, 20 bp, Phyllotreta striolata
gtaggtttagatgctgctgg

SEQ ID NO: 186 - DNA, 20 bp, Phyllotreta striolata
ttcaccgaactggctatatt

SEQ ID NO: 187 - DNA, 20 bp, Phyllotreta striolata
aaaacgaagtcaccaagaaa

SEQ ID NO: 188 - DNA, 20 bp, Phyllotreta striolata
aacctcagagtccacttcaa

SEQ ID NO: 189 - DNA, 20 bp, Phyllotreta striolata
gcagtacaagaaatccaagg

SEQ ID NO: 190 - DNA, 24 bp, Psylliodes chrysocephala
gtctgcaatatttcctgagcatcg

SEQ ID NO: 191 - DNA, 20 bp, Psylliodes chrysocephala
tagcccaaataatttttcca

SEQ ID NO: 192 - DNA, 20 bp, Psylliodes chrysocephala
ggcgtaagtaccatctgaag

SEQ ID NO: 193 - DNA, 20 bp, Psylliodes chrysocephala
attgtatcagaggcttccac

SEQ ID NO: 194 - DNA, 20 bp, Psylliodes chrysocephala
tgatcagtctcttctgaacc

SEQ ID NO: 195 - DNA, 26 bp, Psylliodes chrysocephala
gcgaatttgttttcgtatttggatac

SEQ ID NO: 196 - DNA, 20 bp, Psylliodes chrysocephala
atcgacttctttctggtcag

SEQ ID NO: 197 - DNA, 20 bp, Psylliodes chrysocephala
cctattctgacaacacctcc

SEQ ID NO: 198 - DNA, 20 bp, Psylliodes chrysocephala
ctgtaagaatcggcttgttc

SEQ ID NO: 199 - DNA, 20 bp, Psylliodes chrysocephala
ttaaggtcaaagcttcttgc

SEQ ID NO: 200 - DNA, 20 bp, Psylliodes chrysocephala
ctgcaattagtagccctagg

SEQ ID NO: 201 - DNA, 20 bp, Psylliodes chrysocephala
taacttcatcatccgaatcc

SEQ ID NO: 202 - DNA, 20 bp, Psylliodes chrysocephala
agcaatcataccagcttcaa

SEQ ID NO: 203 - DNA, 20 bp, Psylliodes chrysocephala
tagctgcaggtttaacaact

SEQ ID NO: 204 - DNA, 20 bp, Psylliodes chrysocephala
ctttatttccttggtctgcg

SEQ ID NO: 205 - DNA, 20 bp, Psylliodes chrysocephala
gtttgttcattcttgggcaa

SEQ ID NO: 206 - DNA, 20 bp, Psylliodes chrysocephala
caatcgagaccttcgtagag

SEQ ID NO: 207 - DNA, 36 bp, Psylliodes chrysocephala
  misc_feature (1)..(36): n is a, c, g, or t
nnnnnnnnnnnnnnnnnnnnnnnnnnnnnnnnnnnn

SEQ ID NO: 208 - DNA, 20 bp, Psylliodes chrysocephala
agcacaggacgtctaatttt

SEQ ID NO: 209 - DNA, 20 bp, Psylliodes chrysocephala
ttttcttgggaagatcaggg

SEQ ID NO: 210 - DNA, 20 bp, Psylliodes chrysocephala
cacctcctagctcaaaatgt

SEQ ID NO: 211 - DNA, 20 bp, Phyllotreta nemorum
tcggattgactttggacaat

SEQ ID NO: 212 - DNA, 20 bp, Phyllotreta nemorum
gctgatagctaaccactctc

SEQ ID NO: 213 - DNA, 20 bp, Phyllotreta nemorum
gctggacagagtaatcagag

SEQ ID NO: 214 - DNA, 20 bp, Phyllotreta nemorum
ggtgggattccctctttatc

SEQ ID NO: 215 - DNA, 20 bp, Phyllotreta nemorum
cttttgaacttctctcacgc

SEQ ID NO: 216 - DNA, 20 bp, Phyllotreta nemorum
aactccttcttcttgaccac

SEQ ID NO: 217 - DNA, 20 bp, Phyllotreta nemorum
ctggtcctttttcctttcct

SEQ ID NO: 218 - DNA, 20 bp, Phyllotreta nemorum
tttcttcttatcccaaccgg

SEQ ID NO: 219 - DNA, 20 bp, Phyllotreta nemorum
gcacgatgctaaaaacgtta

SEQ ID NO: 220 - DNA, 20 bp, Phyllotreta nemorum
aatttcctaatcgcctggtt

SEQ ID NO: 221 - DNA, 20 bp, Phyllotreta nemorum
tgtcgcaattgtacttttgg

SEQ ID NO: 222 - DNA, 20 bp, Phyllotreta nemorum
ctaagatgacccggttgtag

SEQ ID NO: 223 - DNA, 20 bp, Phyllotreta nemorum
tacgtctgagagcgatcata

SEQ ID NO: 224 - DNA, 20 bp, Phyllotreta nemorum
aatccttcttgttcgagctt

SEQ ID NO: 225 - DNA, 20 bp, Phyllotreta nemorum
ttttaatttccgctgccatc

SEQ ID NO: 226 - DNA, 20 bp, Phyllotreta nemorum
ccggatgtttgttcgttttt

SEQ ID NO: 227 - DNA, 20 bp, Phyllotreta nemorum
cctgtatgtaccagttacgg

SEQ ID NO: 228 - DNA, 20 bp, Phyllotreta nemorum
aagtatattccatggcgtcc

SEQ ID NO: 229 - DNA, 20 bp, Phyllotreta nemorum
gttttcggcaggattaaagg

SEQ ID NO: 230 - DNA, 20 bp, Phyllotreta nemorum
tacgactagcctatcgacat

SEQ ID NO: 231 - DNA, 20 bp, Phyllotreta nemorum
tccatcctcaacacgatttt

SEQ ID NO: 232 - DNA, 22 bp, Phyllotreta striolata
ggatctttctgttgttctccaa

SEQ ID NO: 233 - DNA, 20 bp, Phyllotreta striolata
cttgggaatcgaaggcaaca

SEQ ID NO: 234 - DNA, 20 bp, Phyllotreta striolata
tatggcttccctcagaaata

SEQ ID NO: 235 - DNA, 25 bp, Phyllotreta striolata
aagagtagattccttctggatgttg

SEQ ID NO: 236 - DNA, 20 bp, Phyllotreta striolata
ggcaaatctgtgataccatc

SEQ ID NO: 237 - DNA, 20 bp, Phyllotreta striolata
gttgcggaagttaaattcgg

SEQ ID NO: 238 - DNA, 20 bp, Phyllotreta striolata
aaaccccacatagctgataa

SEQ ID NO: 239 - DNA, 20 bp, Phyllotreta striolata
tgattacaccaccagatgaa

SEQ ID NO: 240 - DNA, 20 bp, Phyllotreta striolata
ggctggaagtgggaatctct

SEQ ID NO: 241 - DNA, 20 bp, Phyllotreta striolata
gatggttgacacccagggag

SEQ ID NO: 242 - DNA, 20 bp, Phyllotreta striolata
tacttcagcttcttcttggg

SEQ ID NO: 243 - DNA, 20 bp, Phyllotreta striolata
caacaccacgtgatgggcga

SEQ ID NO: 244 - DNA, 20 bp, Phyllotreta striolata
cgtaataattcagattcgcc

SEQ ID NO: 245 - DNA, 20 bp, Phyllotreta striolata
gcttagcgatagctcctgta

SEQ ID NO: 246 - DNA, 20 bp, Phyllotreta striolata
ttcaacaggacgactttgat

SEQ ID NO: 247 - DNA, 18 bp, Phyllotreta striolata
tcacttgcagcagtttcc

SEQ ID NO: 248 - DNA, 20 bp, Phyllotreta striolata
caatcgagaccttcgtagag

SEQ ID NO: 249 - DNA, 20 bp, Phyllotreta striolata
ctttctgtccaagaaccaag

SEQ ID NO: 250 - DNA, 20 bp, Phyllotreta striolata
cttcgtacgttgatagcaca

SEQ ID NO: 251 - DNA, 20 bp, Phyllotreta striolata
acttgggtctcttcttctcc

SEQ ID NO: 252 - DNA, 20 bp, Phyllotreta striolata
ttcttgtcacctccaagttc

SEQ ID NO: 253 - RNA, 2319 nt, Psylliodes chrysocephala
augagcacguacgaagaauacauucaacaaaaugaagaccgagauggaaucagguuuacuuggaauguauggccaucgaguaggauagaagcaacucguuugguaguaccauuagcgugucuuuaucaaccgauuaaagaacguuuagaucuuccacccauacaguaugaucccguucuguguacaagaaauaacugcagagcgauuuuaaauccuaugugccaaguugauuaucgagcaaaauuguggguuugcaauuuuuguuuucaacgcaauccguuuccaccucaauaugcagcuauuucugaacagcaucaaccugcugaguuaaugccuauguuuucaacuauugaguauacuauuacuagagcucaguguuuaccaccgauauucuuguauguuguugauaccugcauggaugaggaagaauuggguucacuaaaagauucuuuacaaaugucacuuaguuuauugccucccaaugcuuuaauugguuugauuacauuugggaaaauggcccaaguucaugaacuagguacugaggguugcaguaaaucauaugucuuuagagguacuaaagauuuaacagcuaagcaaguucaagagauguuggguauugguaaaguugcuauggggccucaacaacaaccaggucaaccuagaccuggucaaaugcaaccugcaccuaucgcgccagguagcagauuccuacagccuguaucuaaaugcgauaugaauuuaacugauuuaauaggagagcagcaaaaagaucccuggccuguucaucagggaaagagaucucuuagauguaccgguguugcuuuaucuauagcuauugguuuauuggagagcacuuaucccaauacaggagcuaggguuaugcuuuuuguugggggaccgugcucucaagggccuggucaaguuuugaaugaugauuuaaaacaaccuauuagaucgcaucaugauauucaaaaagauaaugcaaaauauaugaaaaaagguauaaagcauuaugaugcuuuggcuaugagagcagcaacuaaugggcauuguguugauauuuauucuugugcuuuggaucagacugguuugauggagaugaaacagugcugcaauucuacaggcggucacaugguaaugggagauucauucaauuccucccuauucaaacagacauuccaacggguguucaccaaagaucaaaagggcgaauuaaaaauggcuuucaacgggacucuggaagugaaauguucuagagaauugaaagugcaaggagggauugguucuugcguaucauugaauguaaaagguccgcucguuucggauaccgaaaucgguaugggaaauacggugcaauggaaaaugugcacuuuaacuccaaguaccacuauagcgcuguuuuucgaaguggucaaucagcauucugcaccgauuccucaaggaggaagaggaugcauacaauuuauuacucaauaucagcauucuaauggccagagaaggaucagagugaguaccauagcucgcaauugggcggacgcgaccgcgaauauucaucacauuagcgcuggguucgaucaagaagcggccgcuguaauuauggccaggauggcuguauacagagcggaaucggacgauaguccugauguucuuagauggguggacaggauguugauuagauugugucaaaaauucggagaauacaacaaggacgacgcgaauucguucagauugggucaaaacuuuagccucuauccccaauucauguaccaucugagacguucucaauuccugcaaguuuucaauaauucaccggacgaaacgucguauuaucggcacauguuaaugagagaagaucugacgcagucuuugauuaugauccagccgauuuuguacaguuacagcuucaacgggcccccggaacccguucuguuggauacgaguucgauucaaucggagaggauauuauugauggacacuuucuuccaaauauugauauuccacggagagacaauagcucaguggcguaacuugaaauaccaagauaugccggaauacgaaaacuuuagacaacuguuacaagcacccguggacgaugcucaggaaauauugcagacgagauuucccaugccgagauacaucgauaccgaacagggcggcucucaagcuagauuuuuacuauccaaagucaauccgagucaaacucauaacaauauguacgcauacggaggcgacgcuggugcgcccguuuugaccgacgauguaucccuucaaguguucauggaucaucuaaaaaaauuggcgguuucaucuacagcuuag

SEQ ID NO: 254 - RNA, 2721 nt, Psylliodes chrysocephala
augccacuucguuuagacauaaaaagaaggcuaacagcccguucugaccggguaaaauguguagaccuccauccuacagaacccuggaugcucugcucccuuuacagcggaaacauaaacgucuggaaucaugaaaaucagcaacucguuaaaacuuuugaaguaugugaucugccagugagagcugcaaaauuuguaccaagaaaaaauuggauugucaguggaucugaugauaugcagauaaggguuuuuaauuauaauacccuagauagaguucaugccuuugaagcgcauucugauuauguuagauccauuguuguacauccuacacagccauauauucuaacaaguagugaugauaugcuuaucaaauuauggaauugggaaaaagcaugggccugccaacagguguuugaaggccacauccauuauauuaugcaaauuuccauaaacccuaaagacaacaacaccuuugccagugcuucuuuagacaggaccauaaaagucuggcaauugggugcuuccacugcaaauuucacucucgaaggucaugaaaaaggaguaaacuguguugauuauuaccauggaggugauaaaccauaccuaauaucuggugcagaugauagauuagucaaaauuugggauuaccagaauaaaacuuguguccaaacuuuagaaggacauggacaaaacguuacugcuguuuguuuccauccugaacucccaauagcucuuacuggaagugaagaugguacuaucagaguuuggcaugcaaauacucacagauuagaaagcaguuugaacuauggcuuugaaagaguauggacuauuuucugcuugaaggguuccaauaauguugcuuuagguuaugaugaggguagcauuuuggugaaaguugguagagaggaaccagcuguuaguauggaugcaagugguggaaaaauuauuugggcuagacauucagaauugcagcaggcuaaccucaaggcucuuccagagggugcugaaauuagggauggugaacgccuuccaguuucugugaaagauaugggugcaugugacaucuacccacaaacuauccagcacaauccaaauggucguuucgugguaguuuguggagauggagaauacaucauuuacacagcuauggcauuaaggaacaaagcuuuuggaagugcccaagaguuugugugggcucaagauucaagugaauaugcuaucagggaaucuggaucuacaauuagaauauuuaaaaauuucaaagaaaagaagaauuucaaaucugauuuuggugcugaagguauauuuggaggcuaccuucuggguguaaaauccguuucuggauugacuuucuaugauugggaaacuuuggauuugguuagaagaauugaaauacaaccacgggcaauauauuggucugacaguggcaaauuaguuugcuuggccacugaagauaguuauuuuauacucucauaugauucugaugaaguacaaagggccaaagacaauaaucagguugcugaugauggaguugaaucggcuuuuaaucucuugggugaaauuaaugagucuguacguacuggucuauggguaggagauuguuucauuuacacaaauucuguaaaccguauaaauuacuuuguuggaggugaacuuguaacaauagcccaucuagauggaccacuuuauguucuugguuaugucccuaaagaugacaggcuuuauuuaguagacaaagaacuaagaguaguuagcuaccagcuccuucuuucagucuuagaauaucaaacugcugugaugaggagagauuuuucaacugcugauagagucuugccuucuauuccaaaagagcauagaaccagaguggcacauuucuuagaaaagcaagguuuuaagcaacaagcuuuggcaguuaguucagauccugaacauagauuugaacuagcaguugcacuagaagaucuaaacacagccagagccuuagcucaggaagcuaauaacccucagaaauggagccaacuugccgaacuugcagcuucuacgaacaaucuagaauuagccaaagaauguaugcagaaggcucaagauuacggaggguugcuucuuuuagcuacuagcucaggagaugaaaaaguaguaagggcgcuaggggaugccacucaaacagaaggcaaacauaaucuaucuuucuugucucauuucuuaguuggcgauuuaaauaaaugucugaauauauugauaacaacuggaagacuuccagaagcagcuuucuuugcgaggucuuacuuaccugauaaaaucucagaagugguagaucucuggagaacacaguugucuacuaucaaucagaaagcaggacaaagcuuggcagauccuaaagauuaugaaaaucuguuuccuggucuucaagaagcaauaguagcacagaaauuuuuggaacaaaauaacccuggauuuacuccagcaauguuagcaaccaguaucaccccaaaucaugaaagaaacguuauagcugagguggaagcccagucgaagaauaguggaguaacugggaguucuucucaauauucugugaaggcaccuauugagcaauugaagaaacucucaauugaucaagaugaugaugacgacgacauagauuuagaccuggauggugugaauauagaugaaaauauagacacaacggauaucaacauagaugacgauuuguugagcgauuga

SEQ ID NO: 255 - RNA, 2868 nt, Psylliodes chrysocephala
augacugccguugaacagucuuguuauacuuuaauuaaucuaccaacugauucggagcccuacaaugaaaugcagcucaaaauggaccucgaaaagggcgagguuaagguaaaaauaagagcacuugaaaggauuauacacaugauauuagcuggagaaagauuaccaaacggauucuuaaugacuauuauaaggaauguccuuccccuucaggaucauuuagcuaagaaauuacuucuaauuuuuugggaaauuguaccaaaaacuucaccugauggcaaauuauuacaagaaaugauuuuagugugugaugccuacagaaaagaucugcaacacccaaacgaauuucuucgagguucuacuuuaagauucuuauguaaauuaaaagaaccagaacugcuagaaccucuaauggcuaguaucagagccuguuuggaucacaggcacaguuaugugcgaagaaaugcaguuuuggcuauuuuuacaauuuauagaaauuuugaguucuuaauuccugaugcacccgaacuuauuucuacuuauuuagauggugagcaggauaugucuugcaagagaaaugcuuuucugaugcuuuuacaugcugaucaagauagagcacugucuuauuuggcaaauugucuagaucaaguuacaucauuuggagacauucugcaauuggucauuguugaauuaaucuauaaaguuugccauucaaaucccacagagaggucaagauuuauccgcugcauuuacaaucuauuaaauucaagcaguccugcugucagauaugaagcugcugguacacuuguaacacuuucaagugcucccacagcaguaaaagcagcugcuaguuguuauauugaacuaauuaucaaggaaagugauaauaauguaaaguugauugucuuggacagauugauugcccuuaaggaacaucccagccaugaaaggguuuugcaagauuugguuauggauauauuaagaguguugcaagcuccugacuuggaaguucgcaaaaagacuuuaaaccuagcacuugaacugguaucaucucguaauauagaagaaaugguuuugguucuuaaaaaggagguaucaaaaaccguagauagcgagcacgaagauacaggaaaauacaggcaguuacuuguuagaacacuucauucuuguuguauaaaauucccagauguagcuguaacugucauuccuguuuuaauggaauuuuugucugauaguaacgaguuagcugcuacugacguguuacuauuuuugagagaggccauacagaaguuugauaaucugcaaccacuuauuauugagaaacuucuagaaacauucaaagauauaaaaucuguuaaagugcauagagcagcucuuuggauauugggagaauaugccacuucugucucagacauugaagcuguuauuaaagaaauuaaucaaaccuuaggagaagcuccucuguuggaaacugaacaaaaacuaauuucuggagagacagacgacacaacuacaguuccaacagguggagcuacaacuuugguuacuucagaugguacuuacgccacucagucugccuuuaauucagucaguaaaucuucaaaagaaaaacgaccuccucugaggcaauaucuuauggauggugauuuuuuuauaggagcguccuugacuucuacucuaaccaaauuagcuuuaagauauggucaaauugccucagcugcugauagaaauagguuugaugcugaagucaugcuuauuauggcagguaucauacauuuaggcaaaucagguuuaccgacaaaaccaauaaccaacgaugacaaagaccacauacuuuuuugcuugcgugucaucucagaccgcaccgacccaauaauacaaauuuucucuacucugugucgaucugcucucaaugacauguugauagcgaaggaagcggaagaagccacgacucaaaaaucuaaagaacaauccagacacacuauccaaacagaugacgcuaucaguuuccuucaauuagaagcggacaagagcggcgaacuuggggaaaauguauucgaaaugucuuuaucacaagccuuggucggagguagagguggccaaacagacucccuaaucaguuccaauaaauugaacaagauaacacaguugacuggauuuucggaucccguauauucagaagcuuacguccacguuaaucaauacgauauaguucuugauguuuuaauagugaaucaaacgaacgacacucuucaaaauugcacgcuggaacuggcgacgcugggcgauuugaaacucguagaaaaaccucaaccugucguacucgcgccuaaagauuuuuguaauauuaaggcgaacguuaagguagcuuccacagaaaacggcauuauauuugguaauauuguuuacgacgucaccggugccgcuucagauagaaauguagugguuuuaaaugacauucauaucgauauuauggauuauauuguucccgcgagcuguacagauaccgaguuuaugaggaugugggcagaauuugaaugggaaaauaaggucacuguaaauacaccucucacagaccucgccgauuaccuugaccaucucuugaaaaguacaaacaugaaaugucugacuuccgaaaaagcccuuagcggucaaugcggauuuauggccgccaauauguaugccaaaucuauuuucggagaagacgcgcuugcaaauuugagcauagaaaagccuuucaacaaaccagaugcaccagucgcagggcacaucaggauuagagcuaaaagucaaggaauggcuuugaguuuaggugauaaaauaaauaugacacaaaaaggaacucagaguaaaguagcugcugcauga

SEQ ID NO: 256 - RNA, 615 nt, Psylliodes chrysocephala
cugcauuuaguccuucgucuuagagguggaaugcagauuuuugucaaaacucuuacugguaagacuauuacuuuggaaguggaagccuccgauacuauugaaaauguaaaagcaaaaauucaagacaaagaaggaauucccccagaucagcaacguuugauuuuugcugguaagcaguuagaagauggccgcacccugucugauuacaauauucagaaagaaucaacuuugcacuuaguuuuacgguugagaggaggaaugcagauuuuugugaagacuuuaacaggaaagaccaucacauuagaaguggaaccauccgauucaauugaaaauguaaaagccaaaauucaagacaaagaaggaauucccccagaccaacaacguuuaauuuucgcaggaaaacaauuagaagauggaagaacuuugucugacuacaauauucaaaaagaaucuacacugcauuuaguucuucgucuuagagguggaaugcagauuuucgucaaaacucuuacugguaagaccauaacuuuggaaguggaagccucugauacaauugaaaauguaaaagcuaaaauucaagacaaagaaggaauucccccagaucagcaacguuug

SEQ ID NO: 257 - RNA, 603 nt, Psylliodes chrysocephala
auggagugcuuacuagguauuaaauuuaacgauuuuguacuaauugcugccgauaugacggcggcacaaagcguuaucguuaugaaaacagaugaaaauaagcuguuuaaacuuucuaacaaacucguaauggcuguaucaggagaauccggcgauacuacacaauuugcagaguauauagcuaaaaauauucaauuauauaaaaugagaaauacauaugaauuaaguccugcagaagcagcugcuuuuacucguaggaaucuagcugauacacuccgaagcaggaguccuuaccauguaaauuuacuuuuggcuggauaugaugcaaaggaugggccacaauuauauuacauggacuacuuggcuucuauagccaaaguggauuaugcugcucacggcuauggaggcuucuucucacuauccauaauggaucgcaacuauuugaaaaaccucuccaaacaacaagguuaugaauuauugaaaaaauguguuaaagagguucagaagagacugaucaucaauuuaccuaacuuuaaggugcaauguauugauaaagauggcauacaggauaugccuaacauuaccccaaaagauuuggaguaa

SEQ ID NO: 258 - RNA, 556 nt, Psylliodes chrysocephala
auggcggacgaugaggaaaagaagaggaaacaggccgaaauugaacgcaaaagggccgaagucagggcucguauggaagaggccucuaaagcaaagaaggccaagaaagguuucaugacaccugagagaaagaagaaacuuagguuacuguugagaaagaaagccgcugaagaacuaaagaaagaacaagaacguaaagcugcagaaaggaggcguaucauugaagaaaggugugguaaacccaaauugaucgaugaugccagugaagcaaaacuuaaaacaguuuguaaaacauaucacgaacgaauugacaaacuagaagauaagaaauuugaccuggaaaaugaaguggaauucaaagauuuucagaucucggaauuaaacagucaaguaaacgaccucagaggcaaauucgucaaaccaacauuaaagaagguauccaaauacgaaaacaaauucgccaaauuacaaaagaaagccgccgaauucaacuuccguaaccaacuuaaaguuguuaagaagaaggaauucaccuuagaagaagaagauaaagaga

SEQ ID NO: 259 - RNA, 768 nt, Psylliodes chrysocephala
auggccccaacagagaagcagcccgccaagggcaagaaaguaggaaaacccagaaacuaugaucuaggaaauggcauaguuagguuuucucgaaccaagauguuucauaagaaagcuuuauacaaauuuauugguaaaaaaguagccgcugaaaaaaaaccuauuaagccacguguuaucgagaaacagaucgguggcgaaaaaaacgguggaaaacguuauguauugguagaaaagcgucgggcaguuuacccuacacaagacagaaucaagaagcgaccagcuaaacaguuauuuaaggaucaugccagaacauuaagagccucgaucagcccuggaacaguacuuauucuuuuggccgguucacauaaaggaaagcgugucguuuucuuaaaacaacuuaaaucggggcugcuccuuguuaccgguccguuuggcauuaacgcuugcccucugaggagaaucagucaaagauauguuauugguacacagacaaaaauugacguuagcgguguuaaauuaccggaaaauauuaacgaugaauauuucaagagacaaagacagaagcgggcgaaaaaagaagagggagacauuuuucaaaccaaaaaacaaggauauaaagucagcgaucaaagaaaaacugaccagaaagaagucgauacucaaguauuagcugcaaucagaaaacaccccgacaggaaaguccuuuuggcuuauuuaucagccauguucggcuugcgauccagucaauuuccacacaggcuccag

SEQ ID NO: 260 - RNA, 678 nt, Psylliodes chrysocephala
augucuucagguuuuacuaauuuugcugcacaaaaugguccagacgacuggagggaugccgcccacaguacuggaacuucuauaauggcagcagaauuugauggcgguguuguuauaggagcugauucucgaacaacuacaggggcguauauugcgaauagaguagcagauaaauuaacgaaaauaacugaucauauuuacuguugucguucuggaucugcugcugacacccaagcuauugcugauauuguagcauaucacuuaaauuuccaugguauggaauugggugaggaaccucuuguagaaguaggagcagcaaucuucaaggaacuuugcuacaacuacagagauucguuaauggcuggaauacucguagcagguugggacaagaaaaaagguggucaagucuauuccauacccauugguggaaugugcguuagacaagaaguuucuauuggagguuccgguuccagcuauguuuaugguuauguagaugcuaacuuuaaaccuggaaugucaaaggaagacugcguuaaguuuguuucaaauacuuuggcucuagcaaugucuagagaugguucaucuggagguguugucagaauaggaauuauaacugaaaaagguauagaacguaggguuauuuuagguaaugaguugcccaaauucuaugaggguuaa

SEQ ID NO: 261 - RNA, 747 nt, Psylliodes chrysocephala
auggccgggaagggagauggagaaggcgaagggaauauucucaaauuagaaaaucagauugccgucauuaaauacgugauacucuuuaccaacgucuugcuaugggcccuuggcggagcaauuuuuggucuuugccuuuggcuaagguucgaagagggcauccaagaauggcuucagaaauuagauuccgagcaauuuuacaucgggguuuauguacuuauagucgcuucagugaucgucaugauuguguccuuucugggauguauuagugcccugcaggaaaguucguuugcccuuuuacuguacauuggcagccaagugcucaguuuuauauucgguuuauccgguucagcuguucuucuggauaacagcgccagagauucccacuuccaacccagaauccgagaaaguaugcgacgucuuaucaugaaugcucaucacgaggcauccaaagaaacacuugccaugauucaggaaaauauugguugcuguggcgcugauggagcaagugauuacuuaucucugcaacagccguugccaacucagugcagagauacaguuacagguaauccuuauuaccauggauguguuaacgaacucacaugguucuuugaagagaaaugcggauggauugcaggauuagccaugacgauuuguuuuauugcuguuuuaaacgucguucuuucaacaguacuuauucaagcucuaaagaaagaagaggaacaagccgauucuuacagaaaauaa

SEQ ID NO: 262 - RNA, 2838 nt, Psylliodes chrysocephala
augaauauuacuucagcugcggggauaauaucccuacuagaagaaccaagaccagaauugaaaguauuugcucuaaaaaaauuagauuccauuguugaugaauuuuggccagagauuucagaagcuaucgagaaaauugaaauucuucaugaagacaaaguauuucaacagcaccaacuggcugcauugguagcaaguaaaguuuacuaccauuugggagcauuugaagauuccuuaacauacgcuuugggugcuggcgaucuuuuugauguaaacgcccgaacagaguauguggaaacgacacuugccaaauguauugauuauuacacacaacaucgcauugcuuuggcugaaggcguacgagaugcaaagcccauugaugccagacuugaggccauuguuaaucguauguuucaacguuguuuagaugacggacaaaaccgacaggccaugggacucgcuuuggaaacuagaagaauggacauuuuugaauuguccauuacacaagcugaugacauuauugguaugcugaccuaugcuuuucaggucgcuaugaguuugauccaaaaccgugcauuccgaaacaccguccugaggucucuaguuggucuguaucggggucuaacuacucccgauuacgucaauaugugccagugucuaauuuucuuagacgacccucucccaguggcugaaaucuuagauaaacucgugucugguaaagaagauacugaacugauggccuaccaaauagcauucgaccuauacgagucagcaacucagcaguuuuuggagaggguauugguagcucuuagagcuacugcuccgauuccgucgcugcuggaagagaaggcuaaacccaagauuggcgaucaagccaguagcacuucagcugaggcuucgacuggcgaugccacuguuagugaaucaaagacugaaguuguuaaggaagagaaaucuauugauaguuugucugaucaugaaaaagaacaccagaaacguaucgaaaaguuacacaccauucuuucaggcgaaguguccaucgaacuucaucuucaauuucuuaucagaucuaaucaugcugaucuccuuauuuugaaacaaacaaaagaaaccguccgcguuaguauuugucauacugcuaccguuauagcuaaugcuuucaugcacagcgguaccaccagugaucaauuuuuaagagauaacuuagaaugguuagcaagggcuacaaauugggccaaacucacggcuacggcuucucuuggcguaauucacaggggacacgagcaagaagcuuugaccuuaaugcagagcuacuuaccuaaagaagugggacccaguuccggauauucggaaggcggcgggcuguacgcucucggucucauccacgccaaccacggcgcgaauaucaucgauuaccuacucggucagcugaaagaugcucagaacgaaauggucagacacggugguugucugggucuugguuuggccgccauggguacccacaggcacgacguuuaugaacaacucaaauucaaucucuaucaagacgacgcgaauaccggagaagccgcugguauagccauggguauggucauguugggcuccaauaauucggcaacuauaauggauaugguggcguacgcacaagaaagucaacaugaaaaaauccugcguggauuagcaguggguauaaguuucacgauguauggucgucuagaagaggccgauucacuaauccaucagcugacuucagauaaggauccaauuuuaagacgguccggaauguauaccuuagccauggcuuacugcgguacuggacacaaucaagccaucaggaaauuacuacacguagcggugucagaugucaacgaugauguccgaagagcugcaguuacagcucuugguuucuuguuauucagaacacccgaacaauguccaagcguaguuucccucuuagccgaaaguuacaauccacacgugcgcuacggagccgccauggcucuagguaucgcaugcgcgggaaccggucugcgcgaagccauagccuuacucgaaccgauggucauguucgaucccguuaacuuugugcgacagggcgcucucaucgcuuccgccaugauccucauucaacaaacggaacagacuuguccgaaggucaguuuuuucaggcagacguacgcuucagucauuuccaauaagcacgaagacguuauggcuaaauuuggcgcuauuuuagcucaaggaauaaucgaugcugguggcaggaacgucacuuuaucauuacaaucuagaacuggucacacuaauauguuggcuguggugggaacacugguguucacacaauauugguacugguucccauugucucauugcuuggccuuggccuuuacuccuacguguguuauugcguuaaauacacaacuaaagaugccuaaauuggaauucaagucgaacgccaagcccagccuuuaugccuauccggcgcccauggaggaaaagaaacgcgaagaacgggaaaaagugacgacagcggugcugaguauagccgcuaggcagcgcaggagagaccacgaaagaaagcaucgcgacgaaaaaauggacguggacgaagaaaaggacgacaaaaaaaccgaaaaggaagaaaagaaaccggaagaaaaaaaggaagacaagaagcccgaagagaagaaagcggacgacaagaaaccuucaacuucgacggccgaugauaaaaaggaaaagaaagacgaaaaggaggagaagaagaaggaacccgaaccgaauuucgaaaucuugcaaaauccugccaggaccaugaggcagcaauugaaggugauc

SEQ ID NO: 263 - RNA, 387 nt, Psylliodes chrysocephala
augcaaauuuucgugaaaacucucacagguaaaaccauuacccucgagguagagccaucagauacuauagaaaauguaaaagcaaagauccaggacaaggaagguaucccuccugaccagcagcgauuaaucuucgcuggaaaacaacucgaagauggacguacucuuucagacuauaauauccagaaagaauccacccuucauuuggugcuccguuugagaggagguaucaucgagcccucucugcgucuccuagcucagaaauacaacugcgacaagaugaucugucgcaaaugcuaugcuagguuacacccuagggcuacuaauugcaggaaaaccaaguguggacacacaaacaacuugcgccccaagaagaagcugaaguaa

SEQ ID NO: 264 - RNA, 2640 nt, Psylliodes chrysocephala
augagcucuuuuaaaagagacaaaaaggaagaagaagauggagguauuaaucuuuuccaaaacauugagaaaacaaccguuuugcaagaagcucggguuuuuaaugaaacaaguguaaauccaagaaaauguaccccuauucuuacaaaacuacuuuaucuuuugaaccagggugaaagccucagugucaaagaagcuacagauguuuucuuugcaaugaccaaauuauuccaaucgaaagacguaauuuuacgaagaauggucuauuugggaauaaaagaauugaguucuacugccgaugaugugauuauagucacuucuagucuuaccaaggauaugacuggaaaagaagauaucuaccgagcagccgcaauuagggcucuuugcaguaucacugaugcuacaauguuacaagcaauagaacgauauaugaagcaagcuauaguagauaggaacucggcuguuaguucugcugcucuugucaguuccuugcacaugacuagaauggccccagaaguaguuaaaagauggguuaaugaggcacaagaagcaauuaacagugacaaugugaugguacaauaucaugcauuaggacuacuuuaucauauuagaaagacagaucgguuggcuguaacaaaauuaauagccagauugacuagaaugucuuugaaaucuccauaugcugcuuguauguugaucagaauaacagccaaacuucuugaagaagaagauucuggaaaugacacucccuauuuugaauucauagaauccugucuaaggcacaagucugaaaugguagucuacgaagcagcccaugcaauugucaaucucaaacguaccaccagcagagaauuagcuccagcuguaaguguucugcaacuauucugugguucuccaaaaccaacacuaagauuugcugcagucagaacauuaaaucaaguagcuauuucucacccugcagcuguuacagcuugcaaucuagauuuagaaaacuugauuacugauucuaacagaucaauugcuacuuuggcuauaacuacucuguuaaaaacuggugcugaaucaucuguagaccgucucaugaaacaaauugcaaguuucguuucugaaaucagugaugaauucaaaguuguaguuguccaagccaucaaggcacuagcucucaaguuuccucgcaaacauagcacacuaaugaauuuccugucagccauguuaagggaugaaggaggucuggaauauaaagcaucuauugcugauacuaucauaacuauuauugaagacaauccagaagcuaaagagucagguuuggcacauuugugugaauuuauugaagauugugaacauguuucuuuagcuguaagaauuuugcauuuguugggaagagaggguccaaagacaaagcaaccuucaagauacauccguuucaucuacaaucgaguuauuuuggaauguccaucuauaagagccgcggcaguguccgcaauggcgcaauucggcgcuuccuguccagauuuguuagaaaacauucaaguuuuacuugcaagaugucaaauggauucggaugaugaaguuagagacagagccacuuauuacagcaacauucugaguagaagcgacaagaaccuguacaauaauuacaucaucgauacuuuacaaguauccauuccaucuuuggaacgcucacucaaagaauacacucaaaaccaaacaauccaaccuuuugacauaaaauccguuccacuagcagccguuccaaccucggaagaacgcgagaagaagcacaaaaccgaagguaugcucauaucucaaggcccaguccgcccgccgccgguuuccagagaagagaacuucgccgaaaaacuggcugccaucccaggcauccaacaacuuggaccucuuuucagaagcucagaagucguugaacuuacugaaucugaaacugaguauuuuguacguuguaucaaacacuguuuugcucaccauaucguuuuacaauucgauuguuugaacacucuugcugaucaacucuuggaaaauguuagggucgauuuggacccuaaugaaaacuuugaaauuuuggcugaaauacccugcgaacaguugcauuacaaccaaacggggacgacauaugugauacugaaauucccugaugaugaucuaacaaguugugugggaaccuuuggagcuguucuuaaauuuguugucaaggauugugauccuaccacuggaauaccagacugcgaagaugguuacgaagaagaguacaugcuugaagaucuugaaguaacucuuggggaucaaauccaaaggguaggcaaagucaauugggccgcggccugggacaaggcagcagaaggcucaguagaaaaagaagauaccuauucucucaguucaaugaacacuuuagaugaggcuguaaagaauauuauacaauuucuuggguuggcagcugcugaacgaacugaucagguucccgaaggaaaaaguacucauacauuguuacuuucagguguauucagaggagguaucgaaauuuugguuagagcaaaacuugcauuagcagauggcguuaccaugcaauuaacugugaggucaccugacgauaguguagcagaacucauuacuucuucuguugguuaa

SEQ ID NO: 265 - RNA, 1284 nt, Psylliodes chrysocephala
augucgacuuuagaagauaaaucgaucugggaagacggcgaagaagcgcuaggugaagaaguucucagaaugucuaccgaugaaauaguuagucguacucguuuauuggacaaugagaucaaaauaaugaagagugaaguaaugagaauaaaucacgaauuacaagcacagaaugagaagaucaaagagaacacggaaaaaauaaaaguaaacaaaacguugccuuauuuggugucuaacgugauagaacuguuagaugucgauccccaggaagaggaagaagacggugcagugguagauuuggauucucaaagaaaaggaaaaugugcaguaguuaaaacaucaacccgccaaacuuacuuucugccaguuauagggcugguugaugaggaaaaguugaagccuggugauuuaguuggugucaacaaagacucuuaucucauuuuggaaacgcugccugccgaguacgaugccagaguuaaagcuauggagguggaugagagaccugcugaacaguacucagauauuggagguuuagauaaacaaauccaagaacugauugaagcuguuguguuaccaaugacccauaaagauaaauuuguuaauuuggguauucaucccccaaaaggcguuuuacuauacgggccaccuggaacuggaaaaacccuccuugccagagcaugugcagcucaaacaaaaucaaccuucuuaaaauuagcuggcccccaauuaguccagauguuuauuggugacggcgccaagcuugugagagaugcauucgcuuuagccaaagaaaaaucucccgcuaucauauuuaucgaugaacuggacgcaauaggcacaaaaagauucgauucugagaaagcgggugacagggaagugcaacguacuauguuggaguugcugaaccagcuggauggguucaguucaaccgccgauaucaaagugauagcugcuaccaaucgugucgauauuuuagacccugcucugcuucgaucugguagauuagacagaaagauagaauucccgcaucccaaugaagaagcgagggcuagaaucaugcagauucacuccaggaaaaugacugucaauccugaugugaauuuugaagaacuggcuaggucuacagaugacuuuaauggagcccagugcaaggcuguguguguugaagcugguaugauugcuuugagacguaacgcuaaugccgucacacaugaagauuauauggaugcuauaauggaagugcaagccaagaagaaggcaaaucuuaauuacuaugcuuag

SEQ ID NO: 266 - RNA, 666 nt, Psylliodes chrysocephala
augagcuuuuucaauaaaauauucggagggaaagaaaaagaugaagguccuaccccaggcgaagcuauccagaagcuuagagaaacugaagaaauguuauacaaaaaacaggaauuuuuagaaaagaaaauagaagaauacacauuauuagcuaagaaaaaugccucuaagaauaaacgaguggcccuucaagcucuuaagaagaagaaaagauuggaaaagacucaacugcaaaucgauggaacacuuacaacuauugaaaugcaaagagaagcccucgaaggagcuaguacuaacacagcgguuuuagauucuaugaaaaaugcugcugaugcccuuaaaaaagcacacaagaaccuggauguugauaauguucaugauauaauggaugauauagcggaacaacacgacauugccaaugagaucacaaacgcuauuaguaauccaguugguuucucagaugauauggaugaagaugaauuagaaaaggaacuggaggagcucgaacaagaagguuuagaagaagauuuacucaagguucccggaccuacagaacuuccagccgugcccgcuggagcuauugcuaagccggcaguuguuaaaccugcagcuagaaaagucgaggaugacgaugauaugaaggaauuagaagcaugggcaucauaa

SEQ ID NO: 267 - RNA, 609 nt, Psylliodes chrysocephala
augaaucccgaguaugacuacuuauucaaacuucuucuuauuggcgacucugguguaggaaaaucauguuuauuauugagauuugcagaugauacuuacacggaaaguuauauuaguaccauuggaguagauuuuaaaaucagaacaaucgacuuagauggaaaaacuauuaaauugcaaauuugggacacugcagggcaagaaagauuuagaaccauuaccucgaguuacuacaggggggcgcacgguaucauuguaguguacgauugcacggaccaagauucauuuaacaacguuaaacaauggcuggaagaaaucgaccguuacgcaugcgauaacguaaacaaauuacuuguagggaauaaaagugaucuuacgacuaagaaaguugucgauuucaacacggccaaggaauacgcugaucaguuagguaucccauuuuuggagacgucggcgaagaacgccacgaacguagagcaggccuuuaugacaauggcggccgaaaucaaaaauagaguaggacccccaucaucugccgcagaccaaggaaauaaaguuagguucgaucaaagucguccagucgaaacuaccaaaucuggauguugcuga

SEQ ID NO: 268 - RNA, 651 nt, Psylliodes chrysocephala
auggcgacaaauagaaccgguacugcccagagaccaaacggcgccacccaggguaagaucugucaguucaagcucgucuugcucggcgagagugcugucgguaaaucgagcuuggugcugagguucgucaaaggacaguuccacgaauaucaggaaagcaccaucggagcagcuuuccuuacacaaaccauuugccuggacgauacaacugucaaauuugaaauaugggauacagcgggacaggaaagguaucacaguuuagccccuauguacuauaggggcgcacaggcagcuauaguggucuacgauauuaccaaccaagacacguucggcagggcgaagacgugggugaaagaacuucagaggcaggccagccccacaaucgugauagcuuuggcuggcaacaagcaggacuuggccaacaagaggaugguggaguaugaagaagcgcagacuuacgcggacgaaaacggauuguuauuuauggaaaccucugcaaagacagcaaugaauguuaacgauauauuuuuagcaauagcuaagaaauugcccaagaaugaacaaaccacgggacaggggggcagcgcccagggcaggcgacuggcagaaggcgacgcgggcgccaagacggcaggaaacugcugcaaguga

SEQ ID NO: 269 - RNA, 549 nt, Psylliodes chrysocephala
auggguaauguguuugcgaauuuauuuaaaggccucuuuggcaaaaaggaaaugaggauauugaugguagguuuagaugcugcugguaaaaccacaauuuuauauaaacuaaaauuaggagaaauuguaacaacuauaccaacuauuggauuuaauguggagacuguagaauauaagaauaucagcuuuacggugugggacguggguggucaagauaaaauuaggcccuuguggagacacuauuuucaaaauacacaaggccuaaucuucguaguggacagcaacgauagggagcguaucaccgaggccaaagacgagcucaugcgcaugcucgccgaagacgagcuccgggacgccguacuucuaauauucgccaacaagcaggaccugccuaacgccaugaacgcggccgaaaucaccgacaagcucggucugcauucgcugcgcaaccgcaauugguacauccaggccacgugcgccaccagcggagacggucucuacgaaggucucgauuggcuguccaaucagcugaagaacgccaaucguuag

SEQ ID NO: 270 - RNA, 42 nt, Psylliodes chrysocephala
  misc_feature (4)..(31): n is a, c, g, or u
augnnnnnnnnnnnnnnnnnnnnnnnnnnnnuuuuuuuuuuu

SEQ ID NO: 271 - RNA, 3345 nt, Psylliodes chrysocephala
auguuaacgaaauucgaaaccaaaucugcuaggguaaaagggcugucuuuucaccccaaaagaccuuggauuuuggcaaguuugcauaacggguguauccaguuaugggacuaccguaugugcacccuuuuggaaaaguuugacgagcaugauggaccugugagagggauauguuuucauagucaacaaccucuauuuguaucagguggugaugauuauaagauaaagguguggaacuacaagcaaaaacgauguauuuuuacguuauugggucauuuagauuacauucguaccacaauguuccaucaugaguauccuuggauugugucugcaucugaugaucagacuauaagaauuuggaauuggcaaucaaggacuugcauuuguguccucacaggucacaaucauuaugucaugugugcuacauuccauccaacugaugauuuauuaguuucugcuucauuggauucuacaguuagggucugggauauuucaggucugcguaagaagaauguagcuccaggaccugcaggucuugaagagcaucucaaaaauccugguucaacugauuuauuuggacaagcugaugcuguaguuaagcauguuuuagagggacaugaccgugguguaaacugggcuucauuucauccuacacuuccuuuaauagccucuggggcagacgauaggcaaaucaaacuguggagaaugaaugauucgaaagcuugggagguggauacaugcaggggacauuacaauaaugucucuuguguauuauuccaucccaggcaagagcugcuacuaucaaauggugaagauaggaguaucaggguuugggauauggcuaaaaggacguguuugcauacuuuuagaagggaacaugaacguuuuugggucaugaccagucauccuaaucugaauuuauucgcugcuggacaugaugguggaauggucaucuucaagcuagaaagagaacgcccagcuuauacgguacacggcaaccugcuguacuacguaaaagaacgguuuuugagaaaacucgacuuuaccacguccaaagacgugcccguuaugcaaaucaggggcggagguaaaauuccgguauacagaaugucuuuuaaucccgcagaaaaugccguucuacuuucgacgcgcacuuccaauuuggauaacagcacuuacgaucuguacaugauucccaaagaucaagaacgcgaagaucacguuccagaggcagaaaguaagagauccucugguuugacggcucuuuggguggcgagaaaccguuucgcugucuuagauaggacccaccaauugaucaucaagaauuuaaagaacgaagucaccaaaaagguccaaacucccacgugcgaugaaguuuuuuaugccggcaccggcaugcuacugcuuagagauucggaacacguaacguuguucgacguacaacagaaaaggacuuuggcucaaguuaaaauaaauaaaugcagauacguggucuggucaucggauaugucgcacuuggcgcuucucuccaaacauaaugugacaguuuguaauagaaaauuagacguccugugcucuuuacacgaaaauacucgaguaaaaucaggagcuugggacgauagcgguguauuuaucuauacuaccagcaaucacaucaaguauacccuuaaaaacggcgaucacggaaucaucagaacacucgaucuuccuauauacauaacuagagugaggggaagucaaguguuuugcuuggauagggaaugcaagccgcgucuauuggucaucgauccaaccgaauacaaauucaaacuggcuuuaaucaaccacaaauacgaagaaguuuuguacaugguuagaaauucgcgauugguuggucagagcaucauuucuuacuugcaacaaaaagguuauccugagguggcguugcauuucgucaaagacgacaagacgcgauucacguuggcucuggagugcggcaacaucgagauagcuuuggaggcggcuaaagcgcucaacgauaagaauuguugggaucagcuggcacaagcagcgcuguggcagggcaaucaucaagucgucgaaaugugcuaccaacgcaccaagaguuucgagaaauugucuuuccuguauuugaucaccggcaauuuggaaaaguugagaaaaaugaugaaaaucgcugaaauucgcaaggccaggucgucucaauaccacgcugcgcuuuuauugggcgaucuugaggaaagagugaaggucuugaaggccucgaaccagcugucuuuagcauauuugacagccgccacccauggaaugagagaagaagccgaucaguuaaaagaacaaauaggagacacgaaaaagguaccggauguggauccgaacgccaaauucuugaaccccccaccgccgauacagcaagccgaguccaacuggccuuuguugacuguuagcaggagcuucuucgaaaacaccgcagcgguagccacagcuucagccaacaugaaaucuuuaauggccgaaccgauauccgacguagcaauggaggaagcccaagguuggggcgaugaugacgagcuggagcucgaucccgacgagaagaaacccgacacugcggccgccgguggugacggugaagcugguugggacgucgaagacgaaggauuggaaauacccgauuuaggaccgacggcaacggccgaagucgaggguaauuucguccaucuacccacaccagguccgucuccgccuuuaacuuggacuaaaaacucucaacugguggccgaucacguagcggcagguucuuucgaaucggcugcuagauugcuucacgaucagcugggcgugguggauuucaaaccuuucgaaagucucuucuugaaccucuacagcacguccaagacaguuucuucuuggcaacaaaacgugccgccuucguucaguuauccuuugaggaauuggaaggaggcgaauaucaagaaucaauugccugcuuccggggucaaauugaacgauguggucgcuaaauugcagaucuguuaucaauugacgacgggcggaaaguucacggaggccaucgaaaaacugcaaacucugcuguuguccgucagccuuuuggucgucgacaacaaacaggagauuacggaagcccagcaauugcugagaauagccagcgaguacauuugcggacugcaaauggaaacuuugcgcaaaaccaugccgaaaacgucgccugaagagcagaaacgucagugcgagauggccgcuuacuucacgcacugcaaauuacagcccauccaucaaauccugacccucaggaccgcuuugaacauguuuuucaagcucaaaaac

SEQ ID NO: 272 - RNA, 555 nt, Psylliodes chrysocephala
augggccgguacgcucgggaaccugagaaugcagcgaaaucuuguaaagcuagaggcucaaauuugagaguccacuuuaagaacacaugugagacggcaaaugcuauuagaaaaaugccucucaaaagggcaguaucguacuugaagaauguuguuguucaaaaggaauguauuccuuucagaagauucaaugguggugugggucguugugcucaagccaaacaguucgguaccacacaggguagguggccgaaaaagucugcagaguuucucuugcaacuccuuagaaaugcagaaaguaaugcugauuacaguggacuugauguagacaggcuagugguagaacacauucaagugaauagggcugcuugucugagacgucgaacguacagagcccaugguagaauuaacccauacaugucuucucccugucauauugaacucuggcuaacugaaggcgaaucuaccccugaucuucccaagaaaaccaauaaaaagaagacagcaguggauaagaagaggccuaaggccucugcugcugcaguagcgcauuga

SEQ ID NO: 273 - RNA, 315 nt, Psylliodes chrysocephala
augguuaacguaccaaaacaacgucguacauuuugcaaaaaauguaaaguccacaagacccauaaaguaacccaauacaaaaaaucgaaggaacgucaugcuucccaagguagaagacguuaugacaggaaacaacaagguuuugguggucaaacgaaaccuauuuuccguaaaaaggcuaagacuaccaaaaagauuguauugaggauggaauguacugauugcaaguucaggaaacaaauuccccuuaaaagaugcaaacauuuugagcuaggaggugacaagaaacguaagggacagaugauucaguucuaa

SEQ ID NO: 274 - RNA, 1314 nt, Phyllotreta nemorum
aagcauuaugauacuuuggcgaugagagcagcgacuaauggucacugcauugauauuuauuccugugcacucgaucaaacuggguuaauggaaaugaagcaaugugcuaauucuacagguggucacauggugaugggagacucuuuuaauucaucgcuauucaaacaaacauuccaacggguguuuacuagagaucagaaaaacgauuugaaaauggcuuuuaacggaacauuagaagugaaauguucucgagaauuaaaagugcaaggaggaauuggauccuguguaucauuaaacguuaaaagucaacuggucuccgacacggaaaucggcaugggcaacacugugcaauggaaaauguguacacuuaccccgagcacuacgauggccuuguucuucgaggucgucaaucagcauucugcgccaauuccgcagggaggaagagguugcauacaauucauuacucaauaucaacauucaaguggucaaagacgaauuagagugacgacaguggcucgaaacugggcagaugccacuacuaauauucaccacaucagcgcugguuucgaccaagaagcagcagcaguaauuauggccagaauggcgguuuauagagcugaaucugaugagagucccgacguucugagaugggucgauagaaugcugauucgauugugucaaaaauucggagaguacaauaaagacgaugcugguucauucagauugggucaaaacuuuagccucuauccgcaauucauguaucaccuaaggagaucucaguuccugcaaguuuucaauaauucucccgaugaaacaucguucuaucgacauauguugaugagagaagaucuuacucaaucauugaucaugauucaaccgauuuuguacagcuacaguuucaacggcccuccagagccugugcuguuagauacgaguuccauacagcccgauagaauauugcucauggacacguuuuuccaaauuuugauauuccacggggagacuauagcucaauggagaaauuugaaauaucaagacaugcccgaauacgagaacuuuaggcaauuauugcaagcaccuguugaugaugcucaggagauauuacaaacaagguuccccaugccgagauauauugacaccgaacaaggggggucucaggcuagauuuuuauuguccaaagucaauccgagucagacucacaauaacauguauucauauggaggggacgccggcgcuccaguuuuaacagacgauguaucacuucaaguauucauggaucauuugaaaaaauuggcaguuucgucuacggcuuga

SEQ ID NO: 275 - RNA, 915 nt, Phyllotreta nemorum
gacgcgagcgguggaaaaaucaucugggcuaggcauuccgagcuacagcaggccaauuugaaagccuuacccgaaggagcugaaauaagagacggggaacguuugccgguguccaucaaagacaugggcgcuugcgacauuuacccucagacuauucagcacaaucccaacgggcguuucguggugguuugcggcgauggggaguacaucauuuacaccgcaauggcgcucaggaacaaagcguucgguagcgcgcaggaguucgugugggcgcaggauuccagcgaauacgccaucagagagucggggucuaccaucaggauauucaagaacuucaaagagaagaagaauuucaaaucagacuuuggagcugaaggcaucuauggugguuaucuguugggcgugaagucuguaucuggcuuggcuuucuacgauugggaaacucuggauuugguuagaaggaucgaaauacaaccucguucgauauacugguccgauagcggcaaacuaguuuguuuggccaccgaggacaguuacuucauacuaucuuaugacguugaagaaguucagaaagcaagagauaacaaccagguggcugaugauggaguggaguccgccuucaaucuccuaggugaaguaaacgagucaguucgcacaggucucuggguaggagauugcuucauuuacacgaacgccguaaaccguauaaauuacuucguuggaggugaauuggugaccaucgcgcaucucgauggcccacuguacguacuaggcuacguuccgaaggacgacagacucuauuuagucgacaaagaauugagagugguuagcuaucagcugcuccuuucggucuuggaguaccaaaccgccguuaugagaagagauuucucgacagccgauagaguguugccuucg

SEQ ID NO: 276 - RNA, 2871 nt, Phyllotreta nemorum
augacggcggucgagcagcccuguuacacuuuaauuaaucuuccgaccgauucggagccuuacaaugaaaugcaauugaaaauggaccucgaaaagggcgaagucaaaguaaagauaagggcuuuggaaagaaucauacacaugauauuggcaggcgagagauugcccaacggauuccugaugacaaucauacgaaacguuuugccccuacaagaucaccuggccaagaaacuuuugcucauuuuuugggaaaucgugccgaaaaccacccccgacgguaaauuacugcaggaaaugauccuagucugugacgccuacagaaaggaccugcagcaccccaacgaauuuuugaggggcuccacauugagauuccuaugcaagcugaaggagcccgagcuguuggagccucugaugcccagcauucgaauuugccucgaacacaggcacagcuacguucgaaggaaugccguucuggccauuuuuacgauauacaagaauuucgaauuccucauuccagacgccccugaauugauuucuacuuaucuagacggcgagcaagauaugucuuguaaaagaaacgcuuuccuuaugcuuuugcaugccgaccaagaucgagcccucacuuaccuauccaauugcuuagaucaaguggcuucuuuuggggauauucuacaguugguuauuguugaauugauauacaaagugugccacuccaaccccgccgagagauccagauucauucgaugcauauacaaucuauuaaauucgagcaguccugcuguucgguacgaggccgccgguacucugauuacucuguccagcgcuccgacagccaucaaagccgccgcuaguuguuacaucgaauugaucauuaaagagagcgacaacaacgucaaauugaucguuuuggauagauugaucgccuuaaaggagcaucccagccacgagagaguccugcaggauuugguuauggauauauugagaguuuuaucggcuccugauuuggaagugcgaaagaaaacacuuaauuuagcgcuggaauugguguccucucguaacgucgaagaaaugguguuugugcugaagaaagaggugucuaaaacuguggacagcgaacaagaagacaccgggaaauauaggcaauuguuggucagaacauugcacuccugcugcaucaaauuccccgauauagcugcaacggucauuccuguuuugauggaauuccuguccgauagcaacgaauuagcggccacugauguguugcuauuuuugagggaagccauacagaaauucgauaauuuagagccgcucauuaucgaaaaauuauuggagacauucaaagacaucaaaucugugaaaguacaucgagcugcucuuuggauacugggcgaauacgccacgucgacuggcgacauugaagccgucaucaaggagaucguucaaaccuugggcgaaugcccauuguuggagacugagcagaagaguauaucugguaacacggaugaaagugcgccgguucaugcaccagcuggggcuaccacuuugguuacuucagauggaacguacgccacucagucugcuuucaacguggccagcaaaucgacgaaagagaagagaccuccauugaggcaauaccugauggacggagauuucuucauugccgcuucucuggcuucuacuuuaaccaaacuggcuuugagguauggcgaaaacguuuccgcuuccgauaggaauaaauucgacgccgaaguuaugcucauuauggcuggcauuuugcaucuaggcaaaucagguuugcccguaaaaccgauaaccaacgacgacaacgaccacauccucuucugccugcgcgugcuauccgaucgaacggaccccgucauccaaguauucucgagccucugccgcaacgcccucaacgacaugcugcuagccaaggaaaccgaagaggcgaccgaucaaaaaucccgcgaaaaaucccgagccgccguccaaaccgacgacgccaucaccuucgugcagcuggaguccgaucgaagcggcgagcucggcgaaaacauguuugaaaccucccucucgcaggcccucaugggcggcaagacggcccaauccgacucgaccaucggcucgagcaaacugaacaagaucgcccagcugacgggcuucucggaucccgucuacuccgaagcguaugugcacgucaaucaguacgauaucgugcucgacgugcugguggugaaccaaacgagcgacacgcugcagaacugcacgcucgaauuggcgacuuugggcgauuugaagcugguggagaagccgcaacccgucgugcuggcgccgaaggacuuuugcaacaucaaggcuaacgugaagguggcuucgaccgagaacgguaucauauucgguaacauuguguaugacgugacgggcgccgcgucggacaggaacgucgucguuuugaacgacauucauaucgacauuauggauuacauuguuccggcgucgugcaccgauucggaguuuaugaggaugugggcugaauucgaaugggagaauaaggugaccgucaauacgccgcuuacagaucucaacgaguaccuggagcauuugcuaaagaguacuaacaugaagugucugacgucugagaaggcgcucggagggcaaugcggcuucauggccgccaauauguacgcaaaaucgaucuuuggggaagacgcccuggcgaauuugagcaucgagaagccguucaacaagccggacgcgcccgucgccgggcacauuagaauucgugccaaaagucaggguauggcuuugaguuugggcgacaaaaucaacaugacgcagaaagggacgcaaaguaaggucguugccgcguaa

SEQ ID NO: 277 - RNA, 582 nt, Phyllotreta nemorum
caagacaaagaggguauucccccagaucagcaacgucuuaucuuugcuggaaagcaacuggaagauggaagaaccuuaucugacuacaauauucaaaaagaaucuacucuacauuugguacuucgucucagaggagggaugcaaauauucgugaaaacucucacugguaaaacuauuacucuugaaguugaaccaucugauaccauugagaacgugaaggccaaaauucaagacaaagaggguauucccccagaucagcaacgucuuaucuuugccggaaagcagcuggaagauggacgaacauuguccgacuacaacauucagaaagaaucuacucuacacuugguacuucgucuaagggguggaaugcaaauauuuguuaaaacucucacugguaaaacuauuacucucgaaguugaaccaucugauacuauugagaacgugaaggccaaaauccaagauaaagagggaaucccaccagaucagcagcgucucaucuuugccggaaagcaacuggaagauggaagaaccuuaucugacuacaauauucagaaagaaucuacucuacacuugguacuucgu

SEQ ID NO: 278 - RNA, 603 nt, Phyllotreta nemorum
auggagugccuacuugguauuaaauucgacgauuucguuuuaguugcugccgauaugacugcggcccaaagcauaauuguuaugaaaacagacgaaaauaagcuguucaaauuguccaacaagcuuguuauggcuguauccggagagucuggcgauacuacacaauuugccgaguacauagcuaagaauauucagcuguacaaaaugagaaauaccuacgaacuuagcccaucggaagcagcuucguuuacucguaggaaucucgcugaugcucuuagaagcagaagcccuuaccacguaaauuugcugcuggcuggauacgacgagaaagaaggcccccaauuguacuacauggacuacuuggcgucgaccaucaaaguuaauuacgcugcucacgguuacggaggcuucuuuucguuguccaucauggauagaaacuacagcaaaucucugaguagagaagaaggcuaugaguuguugaaaaaaugcgugagagaaguucaaaagagguuaaucaucaauuugcccaacuucaagguacagugugucggcaaagaugguauaacagauuugcccgauaucaccgccaaggauuuggcuuaa

SEQ ID NO: 279 - RNA, 597 nt, Phyllotreta nemorum
auggcggacgaugaggaaaagaagaggaaacaggcugagaucgagcgcaaaagggcugaggugagggcucgcauggaagaggccuccaaggcgaagaaggccaagaaagguuucaugaccccugaaagaaagaagaaacuuagguuauuguugagaaagaaagccgccgaggaauugaagaaggaacaggaaaggaaagcggccgagaggagacgcaucaucgaagagcgcugcggaaagcccaaauugaucgaugacgccaaugaagaacaacuuaagaguauuuccaaaauguaucacgagagaauuugcaagcuggaagaccagaaauucgauuuggaauaucuagucaaaaagaaagacauggagaucgcggaauugaacagccaagugaacgaccucagaggaaaauucgugaaaccgacguugaagaagguguccaaauacgaaaacaaauucgccaagcugcagaagaaggccgccgaauuuaacuuccgcaaccaacugaaaguggucaagaagaaggaguucacccuagaagaagaagacaaagagaccaagaaagcggauaaagcugaguggcagacgaagaaauga

SEQ ID NO: 280 - RNA, 795 nt, Phyllotreta nemorum
auggucgauaagaagaaggccgaaacugcgcccgcagaggcgcccaaaaggguccacaagccuggaaaaccuagaaauuaugacuuaggaaaugguguuaugagguuuucaagaacaagaauguuccauaagaaggcuuuguacaaauuuauugguaaaaaaguuaaggcuaccaagaaaccacagaagccucacguuaucgaaaagccaauuaauggagaaaagaacggaggaaagagauucgucuuagucaagaagcguagggcuuacuauccuacucaagacaagauuaagccgaggccugcgaagaaguccuucugccagcacaaacguucacuuagaacaaccauaacacccgguacuguucuuauuuuguuggcugguucucacaaggguaagaggguuguuuuccugaagcaacuguacucuggucuuuuacuuguuacugguccguuuuccauuaaugccuguccauugagacguauuagucaacgauacguuaucgcaacauccaccaaaaucgauguaagcgguauuaaaguucccgacaacuuuaaugaugacuauuucgcgagaaaacgcgucaagagggcgaagaaagaggaaggugacauuuuccagaccaagaaagugguuuacaaagcaagcgaggaaaggaaaaaggaccagaaggaaaucgacucgcaggugauggcugcaauuaaaaaacacccugaccgcaaaguucuccaagcuuauuuaucauccaugugggguuugaggucgucucaauauccucacagaaugaacuuuuag

SEQ ID NO: 281 - RNA, 504 nt, Phyllotreta nemorum
augccgccuguaauuaccgauuuuaugccucaggaugguuccaacgauuggagagacgccgcucacagcacaggaacauccauuauggcaucagaauucgacggcggagucgucauaggagccgacucacguacaaccacuggggccuauaucgcaaacaggguguccgacaaacuaacgagaguuaccgaucacauuuacugcugcaggucagguuccgcugcugauacggaggccaucgcagacaucguaggcuaccauuugaacuuccacgggauggaguugggcgaagagccgagcguagaagugggagcggccauauucaaggagcugugcuacaacuacagggacuccuugauggccggcauacugguggccgguugggauaagaagaaaggcgggcagauuuauucgauuccgaucggcgggaugugcgugagacaggaggugucgaucgguggguccgguucgagcuacguguacgguuacauggacgccaauuac

SEQ ID NO: 282 - RNA, 747 nt, Phyllotreta nemorum
auggcagggaaaggagacggcaaaggcgaggcgaguauacucaaauuggaaaaucagauugccgucaucaaauacgugauacucuuuaccaacgucuugcaaugggcccucggcggcgcaaucuuugcccuuugccuuuggaugagguucgaggagggcauccaagaauggcugcagaaauuggauuccgaacaauuuuacaacggaguuuauguacuuauagucgcuucgcugaucgucaugauuguguccuuucugggauguauuagugcccuacaggagaauacggugacccuuuuggccuacaucggcacgcaagugcugagcuucauauucgguuuagccgguucggcuguucuucuggauaacagcgccagagauucccacuuccagccgaggauucgggagagcaugcgacgucuuaucaugaaugcucaucacgagccauccagaguaacgcucgccaugauucaggaaaauaucggcugcugcggugcugacggagcagaagauuacuugucgcugcaacagccauuaccgagccaaugcagggacaccgucaccgguaaucccuauuuccacggaugcgucgacgagcucacgugguuuuucgaggaaaagugcgccuggauagccgcauuggccaugugcauuugcuucuuuaacguuuuuagcaucgugcuuuccacugugcucauacaggcguuaaagaaggaggaggagcagucagaaacuuacaggaaauag

SEQ ID NO: 283 - RNA, 3018 nt, Phyllotreta nemorum
augaauauuacuucggcugcggggauuauaucccuuuuagaagaaccaagacccgaacuuaaaguauuugcuuuaaggaaguuggauuccauaguugaugaauucuggccagaaauuucagaagcuaucgaaaagauagaaauucugcacgaagauaaaguauuccaacaacaucaguuagcugcuuugguugccaguaaaguuuacuaucaucugggggcauucgaagauucacuaacauaugcuuugggagcuggagaucucuucgauguaaaugcuagaacagaauacgucgagaccacacuugcaaaauguaucgacuucuauacacaacaacgcauagcuuuggcggaagguucaaccgaugccaaaccuauagauucgagacucgaagcgaucguaagccgaauguuccaacguugccuggaugacgggcaauaccgccaggcuaugggacucgccuuggagaccagaagaauggacaucuuugaauuaucaaucacccaagcugaugacgucaucaguaugcuaaccuacgcuuuccaaguagcgaugagccugauucagaaccgagcguuucgcaacaccguuuugagaucuuuaguuggcuuguaccgcgguuugaccaccccggacuacguuaacaugugccaaugucuaaucuucuuggacgauccccuaucggucgcugaaauuuuagauaaauugguauccgguaaagaagaguccgaauugauggcuuaccaaauagcguucgaucucuacgaauccgcgacgcaacaguuuuuggagcgaguuuuggucgcacucagggcuaccgcucccauaccuucgcuguuggaggaaaaggucaaaucuaaaaccgccgaacaauccaguagcaccuccacagaggcuaccaaagagccuguuagcagugaaauuaaaagcgagacgaaagaagaaaaaucuuucgaggcuuugacugaaagugaaaaggaacaucaaaagcgaauugagaaauugcauaccaucuuaucgggcgaaguaucgauagaacuucaccuucaauuucucauucgauccaaccacgccgaucuucuuauucugaagcaaacgaaagaaaccguucgaguuaguauuugccacacugcuacagucauugcuaacgcuuucaugcacagcgguaccaccagcgaccaauuuuuaagggauaauuuggaauggcuagccagagcaacgaauugggcgaagcuaacagcaacagcgucucugggcgucauccaucgagggcacgagcaagaggcuuugacucucaugcaaagcuauuugccgaaggaaguugggccgaguucgggauacuccgaaggcggcgguuuguacgcucucggucucauucacgccaaucacggugcuaacauaaucgauuaccuucuuggucaacucaaagacgcccagaacgagaugguuagacacggcgguuguuugggccucgguuuggcugcuaugggcucgcagaggcaggauguguacgaacagcucaaguucaaucucuaucaggacgacgcuaauacuggagaggcugccggaaucgcgauggguaugguuauguugggauccaguaauccaacuacuauuauggauaugguagcguacgcacaagagagccagcacgaaaaaauccuucgcggcuuggcugucggcauaaguuucaccauguacggucgauuagaagaagcugauaccuugauacaacagcuuacuuccgauaaggaucccauccugagaagauccggcauguacacauuagcuauggcuuauugcgguacagggcauaaccaggcgauuaggaaauuauuacacguugcgguaucugauguaaacgaugacgugagaagggcggcagucacagcgcucgguuuccuguuguucagaacccccgagcaaugucccagcguggugucccuuuuggcggagagcuacaacccgcacgugcguuacggggccgccauggcgcugggcauagccugcgcuggcacaggccuucgcgaggccaucgcucugcucgaacccauggugauguucgauccagucaauuucguccggcaaggagcucucaucgccuccgccaugauccucauccagcagaccgagcaaacgugccccaaggucagcuucuucaggcagaccuacucucaggucaucuccaacaagcacgaagacgucauggccaaguucggcgccauuuuagcgcaagguauaaucgaugccgguggcaggaauguaacgcuaucguugcaauccagaacgggccacaccaacaugcuggcugugguugguacauugguguuuacgcaguacugguacugguucccucugucgcauugucuggcuuuggcuuucaccccgacgugcgugauagcguugaaugcucagcuaaagaugcccaaauuggaguucaaaucgaacgcgaagccgagcuuguacgcuuacccggcgcccauggaggaaaagaagcgcgaggaaagggagaaagucaccacggcuguauugaguaucgcugcgaggcagaggaggagggaucacgagaggaagcaucgcgaugagaaaauggauguggaugaagauaaagacgauaagaaaacggaaaaggaggaaaaagagaagaaauccgaagacaaaaaagaggagaaaaaguccgaugauaaaaaaacggacgagaaaaaagcggcaucgucaagcgaugacaaaaaagauaagaaagacgagaaggaggagaagaaaaaggaacccgagccuaacuucgaaauauugcaaaauccugccagaaccaugaggcaacaacugaaagugauaacgcucaacgauaacucgcaauacguugcaaugaaggacguuucuaucggaggacuuguuaugguucgcaauuugaaaccuggugaagaggaauugguggaaccuguagcagcauuugguccgaagggcgaugaugaaaaggaaccagaaccaccagaaccauucgaauggaccgaggauuag

SEQ ID NO: 284 - RNA, 387 nt, Phyllotreta nemorum
augcaaauuuucguaaaaacucucaccgguaaaacuauuacccucgagguagaaccaucagacaccauagaaaaugucaaggcgaaaauccaagacaaagagggaauuccuccugaccagcagcgauugauuuucgcagguaaacaacucgaagauggccguacccuuucagauuacaacauccaaaaggaguccacccuccacuuggugcugcguuugagaggaggaaucaucgagcccucucugcgucuguuggcccaaaaguacaauugcgacaagaugaucugccgcaaaugcuacgccaggcugcacccgagagcuaccaauugcaggaaaaccaaguguggacacaccaacaacuugcgccccaagaagaagcugaaguag

SEQ ID NO: 285 - RNA, 1821 nt, Phyllotreta nemorum
augagcucuuuuaaaagagacaaaaaggaggaagaagacggaguuggaaacauauuccaaaacaucgaaaaaacgacuguucuacaagaagcucgaguguucaacgaaacauccguaaauccaagaaaaugcacccuaauucucaccaaauuacuuuaccuacuaaaucagggggaagcauuaaacguaaaagaagccacagauguuuucuucgcaaugaccaaacucuuccagucgaaagacguaauccuccgaagaaugguguaucucggaaucaaagagcuaagcucgaccgcagaugauguaaucauagugacuucgagccucaccaaagauaugacgggcaaagaagacauuuaccgagcagcugcuauacgugcucuaugcagcaucaccgacgccaccaugcugcaagccaucgagcgcuacaugaagcaggccaucgucgacagaaauuccgcugucaguucggcugcguuggucaguuccuugcacaugaccaaaauggcuccugaaguggucaaaagauggguaaacgaagcacaggaagcuauuaauagcgauaaugugaugguucaauaucaugccuuggggcuccuguaucacaucagaaaaacugauaggcuggcuguuacaaaauuaauugcuaaacucacuagaaccaccuugaaaucuccuuacgcuguuugcaugcucaucagaauaauagccaagcuccuggaagaagaagauuccggcaaugauuuucccuacuucgauuucaucgaguccuguuugaggcacaaauccgagaugguaguuuacgaagcagcccacgcgaucgucaaucucaagcgaacgacuagcaaagaauuggcgccggcugugagcguauuacaacuguucugcggcucgccgaaggcuacuuugagauucgccgccgucaggacucugaaucaaguggccauaucccauccggccgcugugaccgcuugcaauuuggauuuggagaauuugauuaccgauucuaaucgaucgauugccacgcuugcuaucacuacuuuauugaaaacuggugcugaaucgucuguugaucgacucaugaagcaaauagcgaguuucguaucugaaauaagcgaugaauucaaaguuguggugguccaagcgaucagagcacuggcucuuaaauucccucguaagcacaacacucucaugaacuucuuaucggcuaugcugagagacgaaggugguuuggaauacaaagccuccauugcagacaccauaaucacuauuaucgaagauaauccugaagcuaaggaaucaggucuggcucaucugugcgaguuuauugaagauugcgaacacguuucucuagcuguuagaauauugcaucugcuagguagggaaggaccgaaaaccaaacaaccuucuagguacauucguuucaucuacaaccgggucaucuuagagugcccuuccauaagagcagcagcuguuucagccauggcccaauucggagcuucuuguccagauuuguuagaaaauauucaaguauuacuagccaggugccaaauggacucggacgaugaaguuagagacagagccaccuauuacagcagcauauugagcaaaaacgauaaaaauuuguacaacaauuuuauccuagauacuuuacagguuucuauaccaucgcuggagcgcucguugaaagaguacacucagaacccuacgaaucagccauucgauauaaaaucaguuccacugcaagugggcccgucuccggacgagcgcgagaagaagcacaaguccgaaggcaugcugacgucgcaggggcccguccgc

SEQ ID NO: 286 - RNA, 504 nt, Phyllotreta nemorum
gccuuggccaaagagaaagccccugcuauaauauucaucgacgaauuggacgccaucgguacgaagcgauucgacuccgagaaagccggcgacagggaaguccaaagaaccauguuggaacuguugaaccaacuggacgguuucagcuccacuuccgacaucaaagucauagcagcuacgaaucguguggauauucuggaucccgcucugcuucggucuggucgguuggacaggaagaucgaauucccgcaucccaacgaagaggcgagggcgagaaucaugcagauucacuccaggaaaaugacggucaacccggacgugaacuucgaggaauuggcuagaucuacggacgacuucaacggggcucaguguaaggcugugugcgucgaagcugguaugaucgcucucagacguaacgccacugcgguaacgcacgaggacuacauggaugcuauuauggaaguucaagcuaagaaaaaggcuaaucuuaauuauuacgccuaa

SEQ ID NO: 287 - RNA, 642 nt, Phyllotreta nemorum
augaguuuuuuuaguaaaauauucggagggaaggagaaggauacgggccccacgcccggcgaggcuauccaaaagcuuagggaaaccgaggaaauguuauauaaaaaacaagaguuuuuagaaaagaaaauagaggaauacacauuaguagccaaaaagaaugcaucaaaaaauaaaagaguugcgcuccaagcgcucaaaaagaaaaaacgacuggaaaaaacucaauuacaaaucgauggaacacucacuaccaucgaaaugcaaagggaggcccucgaaggggccagcaccaacacagccgucuuagacuccaugaagaaugcugcugaagcccuacagaaagcccacaaaaacuugaaugucgaugauguccaugauaucauggaugacauagcugaacagcacgacauugccaacgagaucacuacugcuauuagccagccgguuggcuucaacgaugaucuagacgaggacgaauuagaaagcgaacuagagaagcucgaacaagaaggauuagaggaagauuuacugaaaguucccggcccuacugaauuaccagcuguaccuacaggagcuauugcuaagccaguuaaaccugcugcuaaaaaaguugaugaggaugaugacaugaaggaauag

SEQ ID NO: 288 - RNA, 609 nt, Phyllotreta nemorum
augaauccugaguacgacuacuuauucaagcugcuucucaucggcgauucuggaguaggaaaaucguguuugcuauugagauuugcggaugauacuuauacggagaguuauauuaguacuauuggaguagauuuuaaaaucagaacaaucgauuuagaugggaaaacaauuaaauugcaaauuugggauaccgccggacaggaacgauuuagaacuauaacaucgaguuacuacaggggcgcgcacggaaucaucgucguguacgauugcacagaccaggacuccuucaauaacgugaaacaaugguuggaggaaaucgaccguuacgcaugcgacaacgucaauaaauuacuuguagggaauaaaagcgaucuuacgacuaagaaaguugucgauuucaacacggccaaggaauacgcggaucaguugggcauaccguucuuggagacaucggcgaagaacgccaccaacguagagcaggccuuuaugacgauggcagcggaaauuaaaaaucgauuaggaccgccgaccgcggccgcugaucaaggaaacaaaguuagauucgaucaaagucguccugucgaaacgacuaaaucgggauguugcuga

SEQ ID NO: 289 - RNA, 369 nt, Phyllotreta nemorum
gcgcaggcggcuauagugguguacgauauaaccaaucaggauacguucggcagagcgaaaacgugggugaaggagcuccaaaggcaggccaguccgacgauugugauagcccuggccggcaauaagcaggauuuggccaacaagcggaugguggaguacgaggaggcgcagaccuacgccgaugaaaacgguuugcuguucauggaaacaucggcgaaaacggcgaugaacguuaacgauauauuuuuagcaauagcuaagaaacugcccaaaaacgaacaaacauccggucaggggggcagcgcccaaggcaggcgacuggcagaaggggaugcgggcgccaaggccccgggaaacugcugcaaguga

SEQ ID NO: 290 - RNA, 549 nt, Phyllotreta nemorum
auggguaauguguuugcuaauuuauuuaaaggccucuucggcaaaaaggaaaugaggauauugaugguagguuuagaugcugcugguaaaaccacaauuuuauauaaacuaaaauuaggagaaauuguaacaacuaucccaacuauugguuuuaaugucgagacuguagaauauaagaauaucagcuuuaccguuugggaugucgguggucaagauaaaauuaggccauuguggagacacuauuuccaaaauacccagggccuaaucuucguaguggacagcaacgacagggagcguaucaccgaggccaaagacgagcugaugcguaugcuggccgaagacgagcucagggacgccguucuccugauauucgccaacaagcaggauuugccgaacgccaugaacgccgccgaaaucaccgauaagcucgggcuacauucguugcgcaaccguaacugguacauacaggccacgugcgccaccagcggagauggucuauacgaaggucuggauugguuguccaaucagcugaagaaugccaaucguuag

SEQ ID NO: 291 - RNA, 5055 nt, Phyllotreta nemorum
augacgcagcaacuguuaccaaucaaguuucaagaacauuugcagcuuaccaauguggguaucaaugcugccaacaucacauuugccacucucaccauggagagcgacaaauacauuugcguuagggaaaaggucggugaaacaucccauguggucauccucgauauggccgacacggccaacccgaucaggagacccaucacggcugaaagugcaauuaugaacccggcuuccaaagucaucgcucucaaaggcaaagccggcauugaaacgcagaaaacccuccaaauuuucaacauagaaaugaaaucgaaaaugaaggcccacacgaugaccgaagacgugaauuucuggaaauggaucagucccaauacguuagcucucgucaccgagacuuccaucuaucauuggucgauggaaggcgauucuauuccccaaaaaauguucgacagacauuccucuuugaacgguugccagaucaucaacuaccgcacggacccgaagcaaaacuggcugcugcuggucggcaucagcgcgcagcagucgcgcgucgucggcgccaugcagcuguacucggucgagcggaagugcucgcagccgaucgaaggccacgccgccucguucgccacguucaaaauggaaggcaacccggagccgucgacgcucuucugcuucgccgucaggacgcugcagggcggcaagcugcacaucaucgaagugggccagaaucccgccggcaaccagccguuuccuaagaaaucuguggauguuuucuuucccccagaggcacagaaugacuucccgguggcuaugcagguuucgaccaaguaugacguuauuuacuugaucacgaaguacggguacauucauauguaugacaucgagagcgguacuugcauauacaugaaccggauuucgagcgauaccauuuuuguaacggcuccucacgagucuacuggcgguauuaucgguguuaacagaagaggacaaguuuuaucggugucuguagacgaggaaaacauuauuagauacauuaauacaguguugcauaacgcagauuuagcucuacguuuggcuacuagaaacaaccuggccggugcugaagagcuguuugucagcaaauuccagaugcuuuuccagaacgggcaguacgcagaagccgccaaagucgccgccaacgcuccuaaaggaauccucagaacgccagcuacaauccaaauguuccagcaaguuccuacccaaccgggccaaaacagcccccugcugcaauacuucgguauacuccucgaucaagggcaacuuaauagguaugaaucacuagaauugugcaaaccgguuuugcugcaaggucgcaaacagcuccuggaaaaauggcugaaagaagagaaacuggaguguucggaggaacugggcgaucuggucaagcaagccgaucccacucuggccuuguccguguaccucagggccaacgugccggccaaggugauccagagcuucgccgaaaccggccaguuccaaaagaucguccuguacgccaaaaaaguauccuacacgcccgauuacguguuccuuuugcggcaagucaugcgaaccaaccccgaucaaggcgccgcuuuugccgggauguugguggccgacgaggagccucuagccgauaucaaucaaaucguggauauuuucauggagcagaacauggugcaacagugcacagccuuucuauuggaugcuuugaagaacaacagacccacugaaggucacuugcaaacgagauugcuggagaugaauuugaugucagcgccucaaguagccgaugcuauucuugguaacaacauguuuacucacuacgaucgagcccauguagcucagcucugcgagaaagccggucuuuugcaaagagcgcuggagcacuacacggauuuguacgacaucaaacgagcuguaguucacacucacuuguugccggccgauugguuggugaauuucuuuggaacguugagcgucgaagacaguuuggagugccucaaggccaugcugaccgccaacaucagacaaaaccugcagauuugcgugcaaaucgccaccaaguaccacgaacagcucaccaccaaagcucucaucgaucuguucgagagcuucaagaguuacgaagguuuguucuauuuccucggcucgaucguuaacuucucccaagaccaggaaguccacuuuaaguacauucaagccgcuugcaaaacggggcaaaucaaggagguggaacgcaucugucgcgaaucgaauugcuacaaugccgagcgggugaagaacuuccugaaggaagccaaacugaccgaucaauugccgcuuauuaucgucugcgaucgguucgauuucgugcacgauuuaguguuguaccucuacaggaacuccuugcagaaauacauugaaauuuacguucagaaagucaaucccagucgcuuaccuguugucguagggggacuauuggacgucgauuguuccgaagacauuauuaaaaaucuaauuuugguaguuagaggacaauucuccaccgacgaauugguagaggaagucgaaaagagaaacagauugaaacugcuguugccuuggcuggagagccgaguacacgaaggcugcguggaacccgccacucacaacgcccucgcgaaaauuuacauagauuccaacaacaacgccgagcgguuccugaaagaaaaccaaugguaugauucucgcguggugggucgcuacugcgaaaaacgcgacccucaccuggcuugcgucgcguacgaacgaggccaaugcgacagagaauugaucgcggugugcaaugaaaacucccuguucaaguccgaagcucgauacuuggugcgcaggcgcgacggcgaauugugggcugaaguacuucaagaaaccaacccguacaggcgucaguugaucgaucaaguaguccaaacggcgcuuagcgagacucaggaucccgaagacauuucugugaccgugaaagcuuucaugacagcugauuuaccgaacgaacugaucgaguugcuggagaagaucguuuuggauaacuccguguucucugagcauagaaaccuucagaauuuacuuauucuuacugcuaucaaggcugaugcuacuagaguuauggauuacauuaaccguuuagacaacuacgacgcucccgauauagcuaauauagcuauaaacaaccauuuguacgaagaagcuuucgccaucuucaaaaaguucgaugucaacacgucugcgauccaagugcucaucgaacaagucaacaaccuagaccgagcuuacgaauucgcugaacguuguaaugaaccggccguguggagccagcuggccaaggcccaacucaaccaagguuugguuaaggaagccaucgauucuuacaucaaggcggacgauccuucugcuuauaucgacgugguggagaccgcuucgaagaacgacagcugggaggaccuggugcgcuaccugcaaauggccaggaagaaggccagagaaagcuacaucgaauccgagcugaucuacucguacgccaagaccggccggcuggccgauuuggaggaauucaucagcggucccaaucacgccgacauccagaaaaucggcgacagauguuuugacgauaaaauguacgacgcugccaaguuguuguacaacaacgugucgaacuucgcucggcuggccaucacguuggugcaccugaaggaguuccaaggggccguggacagcgcccgcaaggcgaacagcaccaggacguggaaggagguuugcuucgcuugcgucgacgccgaggaguuccggcuggcccaaaugugcggcaugcacauagucgugcacgccgacgaacugcaggacuugauaaacuauuaucaagacagagguuacuuugaggaguugauuggucuguuggaagccgccuugggguuggagagggcccacauggggauguucaccgaacuggcuauauuguauucgaaauacaaaccggcuaggaugcgcgaacaucucgaauuguucuggucgcgcguuaacaucccuaaagugcucagagcagccgaacaggcgcaucugugggcugaauugguguuccuguucgacaaauacgaagaguacgauaacgccgugcuggccaugaugacgcaucccaccgaggcguggcgcgaggggcacuucaaagacaucaucacgaaaguggcgaauaucgaauuguacuacaaggcgauccaauuuuaccuggauuucaagccgcuguuguugaacgaccugcugcuggugcuggccccuagaauggaucacaccagggccguggcuuucuucaccaaaaccggccaccugcagcuggucaaauccuaccuacggucuguccaaaauuugaacaauaaagcgaucaacgaggcucugaauucucugcugauagaggaagaggacuuccaggggcucagaacauccauagacgcguucgauaacuuugauaacauagguuuagcccagagauuagaaaagcacgaauuaaccgaauuuagacgcaucgccgcuuaucuguauaaaggaaacaaccgguggaagcagagcguggaauugugcaagaaagacaggcuguucagggacgccauggaauauacuucggaaucuagaaaccaagaauuggccgaagaguuauuggccugguucuuggacagaaaggcguacgauugcuucucggcuugcuuauaccauuguuacgauuugcuucgaccggacgugauucuggagcuggcuuggaagcacaacauaauggacuuugcgaugccguuccugauccaggugacuagggaauugacgacgaaagucgagaaauuggagcaaucggacgcucaaagacaaagcgaggcggccgaggagacgaacaagccgaucaugaugcccgagccgcagcuuauguugacugcggguccuggcauggguauuccgccgcagcaauauaugccucagcaaacguacgcccaagugggauaugcaccucaaauggccuaccaggguuacccggguauguaa

SEQ ID NO: 292 - RNA, 2508 nt, Phyllotreta nemorum
auguugaccaaguucgaaaccaaaucagcaaggguuaaaggacuguccuuccaucccaagaggccauggauuuuagccaguuugcacaacgggugcauccaacugugggauuaucgaaugugcacgcucuuggaaaaguucgacgagcacgacggacccgucagaggcauauguuuccacaaccaacagccccuauucgucucaggcggcgaugauuacaaaauaaaaguauggaauuacaagcagaaacgcugcauuuucacucugcucggccaucuggauuacauccguacgaccauguuccaccacgaguaccccuggaucguguccgccuccgaugaccagaccaucaggauauggaacuggcaauccaggacgugcauuugcguucuaacgggccacaaucacuacguuaugugcgccacuuuucauccgagcgaagauuuauuguuaucagcuucguuggauucuacuguuagaguuugggauauuucgggacugcguaagaagaauguaucacccggucccucgggccucgaagaucaccucaagaauccuggugcuacugagcuauucggccaagccgaugcaguaguaaagcauguuuuggaaggacacgaucgaggagugaacugggcuucauuccaucccuuccuaccucuaauagcuucuggagcugaugauaggcaaauaaagcuguggaggaugaacgauucgaaagcuugggaaguggauacuuguaggggccauuacaacaacgugucuugcguguuguuucauccgagacaggagcugauucugucuaacggcgaggaucggagcauaagggugugggauaugucgaagaggacuugcuugcauacuuuuagaagggaacacgagagauuuuggguuaugacgagccacccgaauuugaauuuauucgccgcuggucacgacggcgguaugguaauauuuaaauuggaaagagaacgaccagcuuacacaguacacggcaaccuacuguauuacguuaaggaaaaguacuugagaaaacucgauuucaccacguccaaggaugucccuguuauccaaaucagaggcggcgguaaaaucccgguauacagaauguccuuuaauccugccgaaaacgccguucugcuauccacucguacuuccaaucuggauaacagcacuuacgauuuguacaugauucccaaggaucaggaaagggacgaucacgugccugaagccgaaagcaagagaucuucgggucuaaccgccuuguggguggccagaaaucgguuugcugugcucgacagaacccaccaauugaucaucaaaaaucugaaaaacgaaguaacgaaaaaaguccaaacacccaccugugaugaaguauuuuacgcuggaaccggcauguugcuguugagggacucagaacacguuacuuuguuugauguccagcagaagaggacuuuggcucaagugaaaauuagcaaaugcagauacgucguguggucuucggauaugucgcaucuagcgcuucuauccaaacauaaugugacgauuugcaauagaaaauuggauguucuguguucguugcacgagaauacuaggguuaaaucuggugcuugggaugauaguggagucuucauuuauacuacuaguaaucauauuaaauacacauugaaaaauggugaucauggaauaauuagaacccuggaucuucccaucuacauuaccagaguaaaagguagucagguguucuguuuggacagggaaugcaagccccgccuguuggugaucgaucccaccgaauacaaauucaaacucgcuuugaucaaucacaaguacgaagaagucuuguacauggucagaaauucucgauugguaggccaaaguauuauauccuacuugcaacaaaaaggauauccagaaguagcccugcauuuugugaaggaugacaaaaccagguuugcucuggcuuuggagugcggcaacaucgaaaucgccuuggaagcugcuaaagcucuaaacgauaaaaauuguugggaccaauuggcacaagccgcuuuauggcaaggcaaucaccaaaucguggaaaugugcuaccaacgcaccaaaagcuucgagaaacuauccuuccucuaccugaucaccggcaacuuggagaagcugaggaaaaugaugaaaaucgccgaaauccgaaaagccagaucgucccaauaccacgccgcucugcugcugggcgaucucgaagagcgcgugaaacugcucaaagccuccaaccaacuaucccuggcuuauuugaccgccgccacgcacggcaugcgagaggaggccgagcagcucaaagaacaaaucggcgacgauaagaaacugccagacgucgaucccaaggccaaguuccugaaacccccgccgcccauucaacaagccgaauccaauuggccucugcucacagucagcaggaguuucuucgaaaacaccgccgccgccgcgaccgcuucggccaacaugaaaucccuc

SEQ ID NO: 293 - RNA, 552 nt, Phyllotreta nemorum
augggccgauacgcucgcgaacccgacaaugcggcgaagucuugcaaagccagaggcuccaaccuucgaguccacuucaagaauaccugcgagaccgcgaacgccauaaggaagaugccccucaaaagggccguagccuaccugaagaacguagucgugcaaaaagaguguauuccauuuaggagauuuaacggaggagucggccguugugcccaagccaagcaauucggcacgacgcaggguagauggcccaagaaguccgcggaauuucuacuacagcuccucaggaacgccgaaagcaacgcagauuacagcgggcuugaugucgauaggcuagucguagaacacauucaaguuaacagggcugcuugcuugagacgucguacauacagggcucacgguagaaucaauccguacaugucuucucccugucacaucgagcuuugguuaaccgagggagaaucaucaccugaagcuccuaagaagagcaacaaaaagaaggcaacggagaagaagagacccaagucauccguugcugcaguagcgcauuga

SEQ ID NO: 294 - RNA, 315 nt, Phyllotreta nemorum
auggugaacguuccgaaacaaaggcguaccuuuugcaagaaaugcaaaguccacaagcugcacaaagugacgcaguacaagaaauccaaagaacgucacgcuucgcaggguagaaggcguuaugacaggaaacagcaggguuucgguggucaaacuaaacccauuuucaggaagaaggcaaaaaccaccaagaaaaucguguugaggauggagugugccgauugcaaguacaggaugcaguucccguugaagagaugcaagcacuucgaacuuggaggugacaagaagcgcaagggccagaugauccaguucuag

SEQ ID NO: 295 - RNA, 2331 nt, Phyllotreta striolata
augacuacuuacgaggaauauauccagcaaaaugaggaccgagaugguauccguuuuacguggaacguguggccuuccaguaggaucgaagccacucgcuuggugguaccauuagccugucuguaucagccucucaaagaaagaguagaucuuccucccauucaauaugauccuguauugugcacaagaaacaacugcagggcuauuuuaaauccacugugucaagucgacuaucgagcuaaauuauggguuugcaacuucugcuuccaaagaaauccauuuccucaacaauaugcagcuaucuccgaacaacaucaaccugcugaauuaaugccuauguucucgacucucgaguacacgauuaacagaguucaaugucugccucccauauucuuguauguuguggauacuugcauggaugaggaagaauuggguucgcugaaggacuccuugcaaaugucguugaguuuguuaccucaaaacgcuuugauuggccugauuacauuuggaaaaaugguucaaguucacgaauuaggcaccgaaggugucagcaaaucuuacguguuccgaggcacuaaagaucuuacggcuaaacagguucaggaaauguuggguaucgguaaagucgcaaugacucaacaacaacaaccucaacaaccggggcaaccuaugagaccuggacaaccucaaucugcaccugucccgccugguagcagauuccugcaaccuauuucuaaaugugauaugaaucuaacagauuuaauuggagaacaacagaaagauccuuggccuguacaucaagguaaaaggccacuaagaugcacugguguugcauuaucgauugcuaucgguuuauuggagugcacuuaugcaaauacaggggcuaggguuaugcuuuuuguugguggcucuuguucacaagguccaggucaaguuuugaacgacgauuugaaacaaccuauuaggucccaucaugauauucaaaaggauaaugcaaaauauaugaaaaaagccauuaagcauuacgauacuuuagcgaugagagcagcgacuaauggucacugcaucgauauuuauuccugcgcacucgaucaaacugguuuaauggaaaugaagcaaugcgcuaauucuacagguggucacauggugaugggagacucguuuaauucaucgcuauuuaaacaaacauuccaaaggguguucacucgagaucagaaaaacgaauugaaaauggcguuuaacggaacauuagaagugaaauguuccagagaauuaaaaguacaaggagggaucggauccuguguaucacuaaacguuaaaagucaacuggucuccgacacggaaaucggaaugggcaacacugugcaauggaaaaugugcacacuuacuccaagcacuacgauggccuuguucuucgaagucgucaaucagcauucugcaccaauuccgcaaggaggaagagguugcauacaauucauuacgcaauaucaacacucgaguggucaaagaagaauuagagugacaacgguggcucgaaacugggccgaugccacuacuaauauucaccacaucagcgcugguuuugaucaagaagcagcagcuguaauuauggccagaauggcuguuuauagagcugaaucugaugagagucccgacguucugagaugggucgauagaaugcugauucgauugugucaaaaauucggagaauacaauaaagacgaugccgguucauucagguugggccaaaacuucagccucuauccgcaauucauguaucaccuaaggagaucucaguuccugcaaguuuucaauaauucuccugaugaaacauccuucuaucggcauauguugaugagagaagaucuuacucaaucacugaucaugauucaaccaauuuuguacaguuacaguuucaacggccccccugagccuguacuauuagauacgaguuccauacagcccgauagaauauugcuuauggacacguuuuuccaaauuuugauauuccacggggagacuauagcucaauggaggaauuugaaauaucaagacaugcccgaauacgagaacuuuaggcaauuguugcaagcuccuauugaugaugcacaagagauauuacaaacaagguuccccaugccgagauauaucgacaccgaacaagggggaucccaggcuagauuuuuauuguccaaagucaauccgagucagacucacaauaacauguacucauauggaggggaugccggcgcuccgguuuuaacagacgauguaucacuucaaguauuuauggaucauuugaaaaaauuggcaguuucguccacggcuuaa

SEQ ID NO: 296 - RNA, 2718 nt, Phyllotreta striolata
augccacuucgguuagacauuaaaagaaagcuaacagcccguucugaccgggugaaaugcgucgaccuccaucccacggagcccuggaugcucugcucgcuuuacagcggaaacauaaacguguggaaucacgaaaaucagcagcucgucaaaacguucgagguaugcgaucugccagugagagcugcgaaauucguuccgaggaaaaauuggaucguuaguggaucugaugacaugcaaauaagaguuuucaauuacaauacguuggaucgcgugcacgccuucgaagcucauucugauuauguucgauccauugugguucauccuacacagccuuauauuuuaaccaguagcgaugacaugcuaauaaagcuguggaacugggagaaagcaugggcgugccagcaaguguucgaaggccacgugcacuacaucaugcagauuuccaucaaccccaaagacaacaacacauucgccagcgccucguuggaccgcacgauaaaagucuggcaauugggcgccuccacggccaauuucacgcucgagggccacgagaagggcgucaauugcgucgauuacuaccacggcggcgacaagcccuaccucauaucgggcgccgacgaucgacuggucaaaaucugggacuaccagaacaaaacgugcguucaaacguuggaaggacacggccagaacgucaccgccguuuguuuccauccggaauugccgaucgcccucaccggcagcgaagacggcacggucagaguguggcacgccaacacgcaccgauuagagagcaguuugaacuacggcuucgaacgggugugggccauuuucugccugaaaggcuccaauaacguggcgcucggcuacgacgaagguagcauccucguuaaggucgguagagaagaacccgccguuagcauggacgccagcggcggcaaaaucaucugggcuaggcauucggaguugcagcaggccaaucugaaagccuuacccgaagggggcgaaauaagagacggcgagcguuugccgguguccaucaaagacaugggcgccugcgacauuuacccucagaccauucagcacaaucccaacgggcguuucguggugguuugcggcgacggggaguacaucauuuacacggccauggcgcucaggaacaaagcguucgguagcgcgcaagaguucguuugggcgcaggauuccagcgaguacgccaucagagagucgggauccaccaucagaauauucaagaacuucaaggagaagaagaauuucaaaucggacuuuggagccgaaggcaucuacggugguuaucuguugggcgugaagucuguauccggauuggcguucuacgauugggaaacucuggauuugguuaggaggaucgaaauacaaccucgcucgauauacuggucugauagcgguaaacugguuuguuuggccaccgaggacaguuauuucauccuaucuuacgaugucgaagaaguucaaaaagcaagggauaacaaccagguggcugaugauggaguggaauccgcguucaaucuccuaggcgaagugaacgaguccguucgaacgggucuuuggguaggagauugcuucauuuacacgaacgcuguaaaccgcaucaacuacuucgucggaggugaauuggugaccaucgcgcaucuggaugggccguuguacgugcugggcuacguucccaaagacgauagacucuauuuagucgacaaagaauugagaguggucagcuaucaguugcuccuuucggucuuggaguaccaaacagccguaaugagaagagauuucucgacggccgacagaguguugccuucgauucccaaggagcacagaacgagaguggcgcauuuccuggagaagcaagguuucaaacagcaggcucuugcugugagcaccgauccugaacacagguucgagcuggcugucgcuuuggaggauuuaaauaccgccaagaugcuggcccaggaggccaacaauccgcagaaauggagccagcuggccgauuuggcggcguccacgaauaaccucguauuggccaaggagugcaugcagaaagcccaagauuacggcggucuauuacucuuagcuaccaguucuggagacgacgagguagugaggacguuaggcgaagccaccgaggccgagggcaagcauaacuuggcguuuuuaucgcacuuauuagucggggauuugaacaaauguuuggauauuuugauaagcaccgguaggcuccccgaagcugcguuuuucgcacggucguaucugcccgauaaaauauccgaagugguggaacuuuggagggcgcaguugucgauuaccaaucagaaagccggucaaaguuuggcggauccuaaagacuacgauaaucucuuucccggucuccaggaagcaaucguggcgcagaaauauuuggaacagaacaacuccggauucauaccggccgcugcagcugccacgguuacuccgaaucacgaaagaaacguaauagcagaaguggaggcgaagguaaaagguggagcuggugugaugccgagcacuucgcauccuucgguuacguugccgagugaacagauggagaaacucucgauuacucaagaugaugacgauuuggauuuggaccuugauggagugaacauugaugaaaauauagauacaacggauaucaauauagaugaugacuuguuaagugauuga

SEQ ID NO: 297 - RNA, 2871 nt, Phyllotreta striolata
augacggcggucgaacagcccugcuacacuuuaaucaauuugccgaccgauucggagccuuacaaugaaaugcaauugaaaauggaucucgaaaagggcgaaaucaaaguaaagauaagggcuuuggaaagaaucauacacaugauacuggcuggcgagagguuaccaaauggguuccucaugacaaucauacgaaacguucugccccuacaagaucaccuugccaagaagcuguugcucauuuuuugggaaaucgugccgaaaaccacccccgauggcaaauuacugcaggaaaugauccuggugugcgacgccuacagaaaggaccugcagcaccccaacgaauucuugcgagggucuacauugagauuccugugcaagcuaaaggagcccgagcuguuggagccucugaugcccagcauacgaauuugccuggaacacagacacagcuacguucgcaggaaugccguucuggccauuuuuacgauauacaagaauuucgaauuucucauucccgacgccccugaauugauuucuacuuaccuagauggcgaacaagacaugucuuguaaaaggaacgcuuuucuuaugcucuugcacgccgaucaagaucgagcccucacuuaucuauccaauuguuuagaucaagucgcuuccuucggggauauccuucaguugguuaucgucgaauugauauacaaggugugccacucuaaccccaccgagagauccagauucauucgaugcauauacaaucuguuaaauucgagcaguccugcuguuagauacgaagcggcagguacucucauuacuuuguccagcgcuccgacugcuauaaaagccgccgccaguuguuacaucgaauugaucauuaaagagagcgacaacaacgucaaauugaucguuuuggauagauugaucgcguugaaggaacauccgagccacgagagaguccuacaggacuugguuauggauauauugagaguguuaucggcucccgauuuggaggugcgaaagaaaacgcuuaauuuagcgcucgaauugguguccucucguaacgucgaagaaaugguguuugugcugaagaaggaggugucgaagaccauggauagcgaacacgaagauaccgggaaauacaggcaacuguuggucagaacguugcauucuuguugcaucaaauuccccgauauagcugcuacggucauucccguucuaauggaguuccuguccgauagcaacgaauuggcggccaccgauguguugcuauuucugagggaagccauacagaaauucgauaauuuggagccgcucauuaucgagaaauuauuggagacauucaaagacaucaaaucggugaaaguucaucgagccgcucuuuggauauugggcgaauacgccacgucgacuggcgacaucgaagccgucaucaaagagaucguucacacguuaggcgaaugcccauuguuggagaccgagcaaaagauuauaucugguaguacugaggaaagcgcuccgguucaugcaccugccggagcaaccacuuugguuaccucagauggaaccuacgccacucaaucugccuucaacguggccagcaaaucgaccaaagagaagagaccuccguugaggcaguacuuaauggacggagauuucuucaucgccgcuucucuggcuucuacuuugaccaaauuggcuuugagguacggcgaaaacgcuucaccuuccgauaggaacaaauucgacgccgaaguuaugcucaucauggccggaauucugcaccuaggcaaaucagguuugccgguaaaaccgauaacuaacgacgacaacgaccauauucucuucugccugcgcgugcuguccgaucgcacggagcccguggugcaaguguucucgaggcucugccgcaacgcgcucaacgacaugcugcuggcgaaggagaccgaagaggcgaccgaucagaaaucgcgcgagaaaucccgagcggccguccagaccgacgacgccaucaccuucgugcaauuggaguccgaucgaagcggcgagcucggcgagaacguguucgaaaccucccugucgcaagcgcugaugggcggcaaaacgggccaauccgauucgagcguaggaucgaguaaacugaauaaaaucgcccagcugacggguuucucggaucccguuuacuccgaagcguacgugcacguuaaucaguacgauaucgugcucgaugugcugguggugaaccagacgagcgauacgcugcagaauugcacguuggaauuggcgacgcugggcgauuugaaguugguggagaagccgcagcccgucguacuggcgccgaaggacuucugcaauauuaaagcuaacgugaagguggcuucgaccgagaaugguauuauauucgguaacaucguguacgauguaaccggagccgcuuccgacaggaacguugucguuuugaacgacauacacaucgauauaauggauuacauuguuccggcaucuugcaccgauucggaguuuaugaggaugugggcugaauucgagugggagaauaaggugaccgucaauacgccguugacggaucucaacgaguaccuggagcaucugcugaagaguacuaacaugaagugccugacgucggagaaggcgcugggcgggcaaugcgguuucauggcggcuaauauguacgcgaaaucgaucuuuggagaggacgcccuggcgaauuugagcaucgaaaagccguuuaauaagccggacgcgcccgucgccggucacauuagaauucgggccaaaagucaggguauggcuuugaguuugggcgacaagaucaacaugacgcagaaagggacgcaaagcaagguggucgccgcguaa

SEQ ID NO: 298 - RNA, 749 nt, Phyllotreta striolata
ccggaaaacaacuggaagauggucgcacucuuucugauuacaacauccagaaagaaucuacucuucacuugguuuugagacuucgugguggaaugcagaucuuuguaaaaacuuuaacuggaaagaccaucaccuuggaagucgagccauccgacaccauugagaauguaaaagcuaaaauccaggacaaggaagguaucccaccagaccagcagagauugaucuucgcaggaaaacaacuagaagauggucguacucuuucugauuacaacauccaaaaggaaucuacucuucacuugguacuuagacuucgugguggaaugcaaaucuucguuaaaacucuuacuggaaagaccaucacucuugaaguugaaccuucugacacuauugagaaugucaaagccaagauccaggacaaggagggaauucccccagaccaacaacguuugaucuucgccgguaaacaauuagaagauggccguacucuuucugauuacaacauccaaaaggaaucuacucuccacuugguacuuagacuucguggaggaaugcaaaucuucguuaaaacuuuaacuggaaaaacuaucaccuuggaagucgagccauccgacaccauugagaaugucaaagcuaaaauccaggacaaggaagguaucccaccagaccaacaacguuugaucuucgcuggaaaacaacuagaagauggucguacucuuucugacuacaacauccagaaggaaucuacucuu

SEQ ID NO: 299 - RNA, 603 nt, Phyllotreta striolata
auggaauguuuacuugguauuaaauucgacgauuucguuuuaguugcugccgauaugacugcggcccaaagcauaauuguuaugaaaacagacgaaaauaagcuguucaaauuguccaacaagcuuguuauggcuguauccggcgagucuggugauacuacccaauuugcggaguacaucgccaagaauauucaguuguauaaaaugagaaacaccuacgaacuuagcccaucagaggcggcuucguucacucguaggaaucucgccgaugcccuuagaagcagaaguccuuaucacguaaauuugcuacuggcuggauacgacgagaaagaaggcccucaauuauacuacauggacuacuuggcgucgaccaucaaaguuaauuacgcugcucacgguuacggaggcuucuucucguugucuaucauggauagaaacuacagcaaaucucuaagcagagaagaagguuacgaguugcuaaaaaaaugcgugaaagaaguucagaaaagauuaaucaucaauuuaccuaacuuuaagguacagugcgucggcaaagaugguaucacagauuugcccgacaucacccccaaggauuuggcuuaa

SEQ ID NO: 300 - RNA, 612 nt, Phyllotreta striolata
auggcggacgaugagaaaaagaaacuggaggaggaaaagaagagaaaacaggcugagaucgaacgcaagagggcugaggugagggcucgcauggaagaggccuccaaggcgaagaaggccaagaaagguuucaugacccccgaaagaaagaagaaacuuagguuacuguugagaaagaaagccgccgaggaacugaagaaggagcaggaaaggaaagcggccgaaaggagacgcaucaucgaagagcgcugcggaaagcccaaacugaucgaugacgccaaugaaggccaacuuaagaagauuugcaaagacuauuaugaccgcauguauauaugugaggagcagaaaugggauuuggaacgcgaaguucgaaaacgggacugggagaucucggaauugaacagucaagugaacgaccucagaggaaaauucgugaaaccgacguugaagaagguguccaaauacgaaaacaaauucgccaaguugcagaagaaggccgccgaauuuaacuuccgcaaccaacucaaaguggucaagaagaaggaguucaccuuagaagaagaagacaaagagaccaagaaagcggauaaagcugaguggcagacgaagaaa

SEQ ID NO: 301 - RNA, 795 nt, Phyllotreta striolata
auggucgagaagaagaaggccgaaacugcgcccgcagaggcgcccaaaaagguccacaagccuggaaaaccuagaaauuaugauuuaggaaauggcguuaugagguuuucaagaaccaagauguuccacaagaaggcuuuauauaaauuuauugguaaaaaaguuaaggcuaccaagaaaccacagaagccucacguuaucgaaaagccaauuaacggagaaaagaacggaggaaagagauucgucuuagucaagaaacguagggcuuacuauccuacucaagacaagauuaagccgaggccugcgaagaaauccuucugccagcacaaacguucgcucagaacuaccauaacacccgguacuguucuaauuuuguuggccgguucccacaaggguaagagggucguuuuccuuaaacaacuguacucuggccuucuacucguaacuggaccguuuuccauuaaugccuguccguugagacguguuagccaacgauacguuaucgcuacaucuaccaaaaucgauguuagcgguauuaaaguucccgacaccuuuaacgacgacuauuucgcgaggaaacgcgucaagagggcgaagaaggaagaaggugacauuuuccaaaccaagaaagagguuuacaaaguaagugaggaaaggaaaaaggaccagacggaaaucgacacgcaggugauggcugcgaucaaaaaacacccugaccguaaaguucuccaagcuuauuuaucagcuaugugggguuugaggucuucucaauauccucacagaaugaacuuuuag

SEQ ID NO: 302 - RNA, 678 nt, Phyllotreta striolata
augccgccuguaaacaccgauuuuaugccacaagaugguucgaaugauuggagggacgcugcucacaguacaggaacuuccauuauggcaucugaauucgacggugggguugucauuggagccgauucacguacaaccacaggggcuuacaucgcaaacaggguguccgauaaacuaacgagaguaaccgaucacauuuacugcugccgguccgguucagcugcugauacagaggccaucgccgacaucguaggcuaccauuugaacuuccacgggauggaacugggcgaagagccgagcguggaagugggagcggccauauucaaggagcuguguuacaacuacagggacuccuugauggccgggauacucguggccggcugggauaagaagaaagggggccagauauauucgauaccgaucggggggaugugcgugagacaggaggugucuaucgguggguccgguucgagcuacguguacgguuacauggacgccaauuacaagccgaaaaugucuaaagaggauugcguuaaauucguaacuaauacuuuggcucuugcgaugucuagagaugguucaucuggugguguaaucagauuagggaucauuacggaggaagguauagaacguaggguuguauuagguaaugaauugccuaaauuuuacgagggcuaa

SEQ ID NO: 303 - RNA, 747 nt, Phyllotreta striolata
auggcagggaaaggagacggcaaaggcgaggcgagcauacucaaauuggaaaaucagauugccgucaucaaauacgugauacucuucgccaacgucuugcaaugggcccucgccggcgcaaucuuugcccuuugccuuuggcugagguucgaggagggcauccaagaauggcugcagaaauuggauuccgaacaauuuuacaacggaguuuauguacuuauagucgcuucgcugaucgucaugauuguguccuuucugggauguauuagugcccugcaggagaauacggugacccuuuuggccuacaucggcacgcaagugcugagcuucauauucgguuuagccgggucggcuguucuucuggauaacagcgccagagauucccacuuccagccgaggauucgggagagcaugcgacgucuuaucaugaaugcucaucacgagccauccagaguaacgcucgccaugauucaggaaaauaucggcugcugcggugcugacggagcagaugauuacuuggcgcugcaacagccauuaccgagccaaugcagggacaccgucaccgguaaucccuauuuccacggaugcgucgacgagcucacgugguuuuucgaggaaaagugcgccuggauagccggauuggccaugugcauuugcuucuucaacguuuuuagcaucgugcuuuccacugugcugauacaggcguugaagaaagaagaagaacaggcggagucuuacaggaaauaa

SEQ ID NO: 304 - RNA, 3021 nt, Phyllotreta striolata
augaauauuacuucggcugcggggauuauaucccuucuagaagaaccaagaccagaacugaaaguauucgccuuaaggaaacuagauuccauaguugaugaauucuggccagaaaucucggaagcuaucgaaaaaauagaaauucugcacgaagauaaaguguuccaacaacaucagcuagcugcuuugguugcuaguaaaguuuacuaucaucugggugcauucgaagauucauuaacguacgcuuuaggagccggugaucucuucgauguuaacgcuagaacugaauaugucgagaccacgcucgcaaaauguaucgacuucuauacgcaacagcgcaucgcucuggcagaaggugcgaccgaugcgaaaccuauagauccgaggcucgaagcgaucguaaaccgaauguuccaacguugcuuggacgacgggcaaaaccggcaggcaauggggcucgccuuggagaccagacgaauggacaucuucgaacuaucgaucacgcaagccgacgauauuaucagcaugcucaccuacgcuuuccaaguggcgaugagccugauccagaaucgagcguuucgcaacaccguguugagaucguuaguaggccuguaucgcggcuugacuaccccggacuacgucaacaugugccaaugucugaucuuuuuggaugaugcgcuagcgguggcggaaauuuuagauaaauuaguguccggcaaggaagaguccgaauugauggcuuaccaaauagcauucgaucucuacgaguccgcaacgcaacaguuucuggagagaguuuuggucgcgcuuagagcuacagcucccauaccuucgcuguuagaggaaaagguuaaaucuaaaaccgccgaaacaucuagcagcacuucagcagagucuggcagcaaagauccugucgucggugaaacuaaaagcgaggcgaaagaagaaaaaucuaucgaggguuugacugaaagugaaaaggaacaccaaaaacgaaucgaaaaauugcacaccaucuuauccggcgaaguaucuauagaacuccaucuucaguuucucauuagauccaaccacgccgaucuucuuauucugaagcaaacgaaagaaacgguucgaguuaguauuugccacacugcuacagugauugcuaacgcuuucaugcacagcgguacuaccagugaccaauuuuuaagggauaauuuggaauggcuagccagagcgacgaauugggcgaaacuuacagccacagccucccugggugucauccaucgugggcacgagcaagaagcuuugacgcucaugcaaagcuauuuaccgaaggaagucggaccgaguuccggguauuccgaaggcggcgguuuguacgcucuuggucuuauucacgccaaucacggugcuaauaucaucgauuaucuccuuggucaacugaaagacgcucagaaugagaugguuagacauggcgguuguuugggccucgguuuggcugcuauggggacgcacaggcaagaucucuacgaacagcucaaguucaaucucuaucaagacgaugcuaauacuggagaggcugccggaauugcgauggguaugguuauguugggauccaguaauuccacuacuaucauggauaugguagcguacgcccaagagagucaacacgaaaagauucuucgcgguuuggcggucgguauaagcuucaccauguacggucgauuagaagaagcugauacccuaauacaacagcuuauuuccgauaaggauccgauccugagaagauccggcauguauacauuagcuauggcuuauugcggaacgggacauaaccaggcgauuagaaaauuauuacauguugcgguuuccgauguaaacgaugaugugagaagagcggcagucacagcgcucgguuuccuguuguucagaacgcccgagcaaugucccagcguggugucccuuuuggcggagagcuacaauccgcacgugcguuacggcgccgccauggcgcugggcauagccugcgcggguaccgggcuucgcgaggccauagcccugcucgagcccauggucauguucgauccggugaauuucgugcggcaaggggcucucaucgcguccgcgaugauccucauccagcagaccgagcaaaccugcccgaaggucagcuucuucaggcagaccuacucgcaggugauuuccaacaagcacgaagacgucauggcgaaguucggcgccauuuuggcgcaagguauaaucgacgccgguggcaggaacgugacgcugucguugcaauccagaacgggccacacuaacaugcuggcggucgucgguacuuugguguuuacgcaguauugguauugguucccucugucgcauugucuggcuuuagcuuucacaccgacgugcgugguagcguugaaugcgcaacuuaagaugccuaaauuggaguucaaaucgaacgcgaaaccgagccucuaugccuacccggcgcccauggaggagaagaaacgcgaagaaagggagaaagucaccacggcgguuuugagcauagccgcgaggcaaagaagaagggaccacgagaggaagcaucgcgacgagaaaauggauguggacgaagauaaagacgauaagaaaacggagaaggaggagaaagagaagaaauccgaagacaagaaagaggagaaaaaguccgaugauaagaaggcggacgauaagaaagcggcgucgucgagcgaugauaaaaaagauaagaaagacgagaaggaggagaagaaaaaagagccggagccuaauuucgaaauccugcaaaaucccgccaggacgaugaggcaacaacugaaagugauuacgcucaacgauaauucgcaauacgucgcuaugaaagacguuuccaucgggggacucauuaugguucgcaauuugaaacccggagaagaggaauugguggaaccuguagcagcauucgguccgaagggcgaugacgaaaaggaacccgaaccgccagaaccauucgaauggaccgaggauuag

SEQ ID NO: 305 - RNA, 387 nt, Phyllotreta striolata
augcaaauuuucguaaaaacucucaccgguaaaacuauuacccucgagguagaaccaucagacaccaucgaaaaugucaaagcgaaaauccaggauaaggaaggaauucccccagaccagcagcgauugaucuucgccgguaaacaacuggaagacggccguacccuuucagauuacaacauccaaaaggagucuacccuccacuuggugcugcguuugagaggaggaaucaucgagcccucucugcgucuguuggcccaaaaguacaauugcgacaagaugauuugccgcaaaugcuacgccagguuacauccgagagccaccaauugcaggaaaaccaaguguggacacaccaacaacuugcgccccaagaagaagcugaaguag

SEQ ID NO: 306 - RNA, 2637 nt, Phyllotreta striolata
augagcucuuuuaagagagacaaaaaggaggaagaagauggaguuggaaauauauuucaaaacaucgaaaaaacgacuguuuugcaagaagcucgaguguuuaacgaaacauccgucaauccaagaaaaugcacccuaauucucaccaaauugcuuuaccuacuaaaucagggugaagcuuuaaacgugaaagaagccacagauguuuucuucgcgaugaccaaacuguuccaaucgaaagauguaguccuucgaagaaugguguaucuaggaaucaaagaacucagcucgaccgcagaugauguaaucauaguuacuucgagccucaccaaagauaugacgggcaaagaagacauuuacagagcagcugcuauacgugcguugugcagcaucaccgaugcuaccaugcugcaagccaucgaacgauacaugaagcaggcaaucgucgauagaaauuccgcugucaguucagcugccuuggucaguucuuugcacaugaccaaaauggcuccugaggugguuaaaagaugggugaacgaagcacaggaagcuauuaacagcgauaaugugauggugcaauaucaugccuuggggcuccuguaucacaucagaaaaucagauagguuggcuguuacgaaacuaauagcuaaacuaacuagaacuaccuuaaaaucuccauaugcuguuuguaugcuuaucagaauaauagcuaagcuccucgaagaagaagauuccggcaacgauuuucccuacuucgauuucaucgaaucuuguuugaggcacaaaucugagaugguuguuuacgaggcagcccacgcgaucgucaaucucaaacguaccacuagcaaggaacuggcgccggcugugaguguauuacaauuguucugcgguucaccgaaggccacuuugagauucgccgccguuagaacucuaaaccaaguggccauuucccauccggccgccgucacggcuuguaauuuagauuuggagaaucugauuaccgauuccaaucgaucgaucgccacgcuugcuaucacuacuuuauuaaaaacuggugcugaaucgucaguugaucgucuuaugaaacaaauagcuaguuucguaucugaaaucagcgaugaauucaaagucgugguaguccaagcgaucagagcgcuggcucuuaaauucccucgaaagcacaacacucucaugaacuuuuuaucggccaugcuaagagaugaaggcgguuuggaauauaaagcuuccauugcagacaccauaaucaccauuaucgaggauaauccugaagcuaaagaaucgggucuggcucaucugugcgaguuuaucgaagauugcgaacacguuucuuuagcuguuagaauacugcaucugcuugguagagaaggaccgaaaaccaaacaaccuuccagauacauccguuucauuuacaaccgcgucaucuuagagugcccuuccauaagagcagccgcugucucugccauggcccaauucggagcuucgugucccgauuuguuagaaaauauucaaguauuacuagccagaugccaaauggacucugacgaugaagucagagacagagcuacuuauuacagcagcauacuuagcaaaaacgauaaaaacuuguacaacaacuuuauccuugauacguuacagguaucuauaccgggguuagaacgcucguugaaggaguacacgcagaacucuacgaaucaaccguucgauauaaaaucagugccgcugcaagugggcccgucuccggacgagcgcgagaagaagcacaaauccgaaggcaugcugucgucgcaggggccccugcgaccgccgcccgucucgcgcgaggagaacuucgcggagaaacugucggccauaccgggcauccagcagcucgguccgaucuucaagagcuccgacgugguggagcugaccgaauccgagacggaguacuucgugcggugcaucaagcacugcuucgcccaucacgugguguugcaguucgacugccugaacacgcugcccgaucaauugcuggaggacgugcgcguggagcuggagccgagcgaaggguucgaauugcugucggugauaccgugcaagcagcugcauuacaacgagaccaaucacaccuacgccauuuugaaguuccccgacgacgauuugccgaguugcgucgguacguucggggcgguguugaaguuuaucguuaaagauugcgauccuacgacuggcauucccgauagcgaagaaggauauaaugaugaauacauacucgaagauuuggaaauaacguugggcgaucaaauacagagggugagcaaaguuaauuggggcgcugcaugggaaacggcugcugagaguuccguagaaaaggaggauacauauucucuaaguucaaugaauacguuggacgaagcugugaaaaauaucgugcaguuccuuggauugcaaccggccgaaagaacugauaaagugccugaaggcaagagcacccacacccuuuuauuaucaggagucuuuagaggugguaucgauauuuugguaagagcuaaacuugcuuuggcggaugguguuacaaugcaauugacuguaagaucacccgaugacagcauagccgaacuuauuaccucuucuguaggu

SEQ ID NO: 307 - RNA, 1284 nt, Phyllotreta striolata
augucgaccuuagaagacaaaucgauuugggaagacggcgaggaagcgcucggcgaggaaguuuuaagaauguccacugacguuaucauaggucauacgcgauugcuggacaaugagaucaaaauaaugaagagcgaagugaugcgaauaaaccacgaacugcaagcgcaaaacgagaaaaucaaagaaaacaccgagaagauaaaagugaacaaaaccuugccuuacuuggucucgaacguaauugaacuguuggacguagauccccaggaagaggaagaggacggugcuguagucgauuuggauucucagagaaaagggaaaugcgcuguaguuaaaacguccacgagacagaccuauuuccuacccgugauagggcuggucgaugaggagaaacugaaaccgggagaucuagugggagucaacaaagacucguaucuaauucuggaaacauuaccugcagaguacgaugcgagagucaaggccauggaagucgacgaaaggccuucugaacaguauuccgauaucggagguuuagauaagcaaauacaagaacuuaucgaggcuguuguacuaccuaugacucauaaagacaaguucguuaacuugggaauucauccucccaaagguguucuccuuuacggucccccggguaccgguaaaacccuccuagccagagccugcgccgcccaaaccaaaucaacuuuccucaaacuggccgguccucaguuaguccagauguucauaggcgacggcgccaaguuaguccgagacgccuucgccuuggccaaagagaaggcacccgcuauaauauucaucgacgagcuggacgccaucgguacgaagcgauucgacucggagaaagccggagaccgggagguccaacgaaccauguuggaacugcucaaccaacuggacggcuucagcucgacauccgacaucaaagucauagcggcuacgaaucgcguggauauucuggaucccgcccugcugcgguccggaagguuggaccggaagaucgaguucccgcaucccaacgaagaggcgcgagcgagaaucaugcagauucacuccagaaaaaugacgguuaacccggacgugaacuucgaggaauuggccaggucuacugaugacuucaauggggcccaguguaaggcugugugugucgaagcuggaaugaucgcucucagacguaacgccacugcugugacucacgaggacuacauggaugcuauuauggaaguucaagcuaagaaaaaggcgaaucugaauuauuacgccuaa

SEQ ID NO: 308 - RNA, 660 nt, Phyllotreta striolata
augaguuuuuuuaguaaaauauucggaggaaaagaaaaggauacgggucccacgcccggagaagcuauccaaaagcucagggaaaccgaggacauguuauauaaaaaacaagaguuuuuagaaaagaaaauagaggaauacacauuaauagccaaaaagaaugcaucaaagaacaagagaguugcuuugcaagcgcucaaaaagaaaaaacgcuuggaaaaaacccaauuacaaaucgauggaacacucacuaccauugaaaugcaaagggaagcccucgaaggagccaguaccaacacagccgucuuagauuccaugaagaaugcugcugaagcccuacagaaagcccacaaaaacuugaauguugaugauguccaugauaucauggaugacauagcugaacagcacgauauugcuaaugagauuacuacugcuauuagccagccgguuggcuucaaugaugaucuggaugaggaugaauuagaaagugaacuagaaaagcuugaacaagaaggauuagaggaagauuugcugaaagugccugguccuacugaauuaccugcuguaccuacaggagcuaucgcuaagccaguuaaaccugcugcuaaaaaaguggaggaugaugaugacaugaaagaauuggaagcuugggcuucguaa

SEQ ID NO: 309 - RNA, 609 nt, Phyllotreta striolata
augaauccugaguaugauuacuuauucaagcugcuucuuaucggcgauucuggaguaggaaaaucguguuugcuauugagauuugcggaugauacuuacacggagaguuauauuaguacuauuggaguagauuuuaaaaucagaacaaucgacuuagauggaaaaacaauuaaauugcaaauuugggauaccgccggacaggaaagauuuagaacuauaacaucgaguuacuacaggggcgcgcacggaaucaucgucguguacgauugcacagaucaggacucguucaacaacgugaaacaaugguuggaggaaaucgaccguuacgcaugcgacaacgucaauaaauuacuuguaggaaauaaaagugaucuuacgacuaagaaaguugucgauuucaauacggccaaggaauacgcggaucaguugggcguaccguuuuuggagacgucggcgaagaacgccaccaacguagagcaggccuuuaugacgauggcggcggaaauuaaaaaucgauuagggccgccgaccgcggccgcggaucaaggaaacaaaguuagauucgaucaaagucguccuguugaaacgacuaaaucgggauguugcuga

SEQ ID NO: 310 - RNA, 651 nt, Phyllotreta striolata
auggcaacaaaucgaacuggcgccgcccaaagaccaaacggcgcuacccaggguaaaaucugccaguucaaauugguguugcucggcgagagcgccgucgguaaauccagucuggugcugagguucgucaagggccaguuccacgaguaccaggagagcaccaucggggccgccuuucucacccaaacuaucugcuuggacgacaccaccguuaaauucgaaauaugggacaccgcgggacaagaaagguaucacaguuuagcuccgauguacuacagaggggcgcaggcagcuauagugguguacgacauaaccaaucaagauacguucggcagagcgaaaacgugggugaaggaacuccagaggcaggccaguccgacgaucgugauagcccuagccggcaacaagcaggauuuggcuaacaagcggaugguggaguacgaggaggcccaaaccuacgccgaugagaacgguuugcuuuucauggaaacaucggcgaaaacggcgaugaacguuaacgauauauuuuuagcaauagcuaagaaacugcccaaaaacgaacaaacauccggucaggggggcagcgcccaaggcaggcgauuggcagaaggagaugcgggcgccaaggccccgggaaacugcugcaaguga

SEQ ID NO: 311 - RNA, 549 nt, Phyllotreta striolata
auggguaauguguuugcuaauuuauuuaaaggccucuucggcaaaaaggaaaugaggauauugaugguagguuuagaugcugcugguaaaaccacaauuuuauauaaacuaaaauuaggagaaauuguaacaaccaucccaacuauugguuuuaaugucgagacuguagaauauaagaauaucagcuuuacugugugggaugucgguggucaggauaaaauuaggccauuguggagacacuauuuucaaaauacgcagggccuaaucuucguagucgacagcaacgacagggagcguaucaccgaggccaaagacgagcugaugcgcaugcuggccgaagacgagcuccgggacgccguucuuuugauauucgccaacaagcaggauuugccgaacgccaugaacgccgccgaaaucaccgauaagcucggauuacauucguugcgcaaccguaacugguacauacaggccacgugcgccaccagcggagacggucucuacgaaggucucgauuggcuguccaaucagcugaagaacgccaaucguuag

SEQ ID NO: 312 - RNA, 5055 nt, Phyllotreta striolata
augacgcagcaacuguuaccaaucaaguuucaagaacauuugcagcuuaccaaugucgguaucaaugcggcuaacaucacguuugccacucucaccauggagagcgacaaauacauuugcguuagggaaaaggucggggaaacaucccaaguggucauccucgauauggcggacaccgcgaaccccaucaggagacccaucacggcggaaagugcaauuaugaauccggcuucuaaagucaucgcucucaaaggcaaagccggcaucgaaacgcagaaaacccuccaaauauucaacauagaaaugaaaucgaagaugaaggcgcacacgaugucggaggacguguuuuucuggaaauggaucagccccaauacguuggcucuggucaccgagacguccaucuaucauuggucgauggagggcgauucuauuccgcaaaaaauguucgacagacauuccucucugaacgguugccagaucaucaacuaccgcacggacccgaagcaaaacuggcugcuguuggugggcaucagcgcccagcagucgcgcgucgucggcgccaugcaauuguacucggucgaacggaagugcucgcagccgaucgaaggccacgccgccucguucgccaccuucaagauggagggcaacccggagccgucgacgcucuucugcuucgccgucaggacgcugcagggcggcaaguugcacaucaucgaggugggccagaacccggccggcaaccagccguuucccaagaaguccguggacguuuucuucccgcccgaggcgcagaacgacuuccccguggcgaugcaggucuccaccaaguacgauguuauuuacuugaucacgaaguacgguuacauucacauguacgauaucgagagcggcacuugcaucuacaugaaccggauaucgagcgauacgauuuucgugacggcuccgcacgaauccaccggcgguauuaucggcguuaauagaagaggucaaguucuaucggugucuguggacgaggagagcauuauuagauacauuaauacgguauugcauaacgcugaucuagcacuacguuuagcuacuagaaacaaccuggcuggugcugaagauuuguuugucaguaaauuccagaugcuuuuccaaaacgggcaguacgccgaagccgcuaaagucgccgccaacgcuccuaaaggaauccucagaacgccagcuacaauccaaauguuccagcaaguuccaacucaacccggccaaaauagccccuuauugcaauacuuugguauacuucucgaucaaggacaacuuaauagauacgaaucguuggaauugugcaaaccgguuuugcuucaaggccgcaaacaacuauuagaaaaauggcugaaagaggagaaauuggagugcucggaggaauugggcgaucuggucaaacaagccgaucccacguuggcucuaucgguguaccucagggccaacguuccggcgaaagugauccagagcuucgccgaaaccgggcaauuccagaagaucguguuguacgccaagaaagucuccuacacgcccgauuacguguuccuuuugcggcaagucaugcgcaccaaccccgaucaaggcgccgccuucgccggcaugcugguggccgacgaggagccuuuggccgauaucaaucaaaucgucgacaucuucauggaacagaacauggugcaacagugcaccgccuuccuguuggacgccuugaagaacaacagacccaccgaaggucacuugcaaacaagauuacuggagaugaauuugaugucggcgccucaaguggccgacgcgauccucggcaacaacauguucacgcacuacgaucgcgcccacgucgcucagcucugcgagaaagccggucuuuugcaaagggcccucgagcacuacaccgauuuguacgacaucaagcgggccgucguccacacucaccugcugccggccgauuggcuggugaauuucuucggaacguugagcgucgaagacagcuuggagugccugaaggcgaugcugacggcuaacaucagacaaaaccugcagauuugcgugcaaaucgccaccaaauaccacgaacagcucaccaccaaagcucucaucgaucuguucgagagcuucaagaguuacgaagguuuguuuuauuuccucgguucgaucguaaacuucucccaagaccaggaggugcacuuuaaguacauacaagcggcgugcaagacgggccaaaucaaggaagucgaacgcaucugucgcgaaucgaauugcuacaacgccgagcgggugaaaaacuuccugaaagaggccaaacugaccgaucaauugccgcucauaaucguuugcgaucgcuucgauuucguccacgauuuggucuuguaccucuacaggaacuccuugcagaaguacauugaaauuuacgugcagaaagucaaccccagucguuugccugucgucgugggcggacuguuggacgucgauuguuccgaagacauuauuaaaaaucuaauuuugguaguaagaggacaauucucgacagacgaauugguggaagaaguggaaaagagaaaccgauugaagcugcuguugccuugguuggagagccgaguucacgaaggaugcgucgaacccgccacucacaacgcccuggcgaaaauuuacauugauuccaacaacaacgccgagagguuccucaaagaaaaccaaugguacgauucgcgcguagugggccguuacugcgaaaaacgcgauccucaccuggcuugcgucgccuacgaacgaggccaaugcgacagagaauugaucgcggugugcaaugagaauucccuguucaaguccgaggcccguuacuuggugcgcaggcgcgacggcgaauugugggcugaaguacuucaagaaagcaacccguacagacgucaguugaucgaucaaguaguucaaacggcgcucagcgaaacucaggaucccgaagacaucuccgugacugugaaagcuuucaugacagccgaucuaccgaacgaguugauugaauugcuggagaagaucgugcuggauaguuccguguucuccgaacauaggaaucuccagaauuugcuuauucuuaccgcaaucaaagccgaugcuaccagagucauggauuacauuaaccguuuagacaacuacgacgcucccgauauagcgaacauagcuauaaacaaccauuuguacgaagaagcuuucgccaucuucaaaaaguucgacgucaacacuuccgcgauccaagugcucaucgagcaagucaacaaucucgaucgagcuuacgaauucgccgaacguugcaacgaaccggccguguggagccagcuggccaaggcccagcucaaccagggccuggugaaggaggccaucgauucguacaucaaggcggacgauccgucggccuacaucgacguggucgaaacggcuucgaagaacaacagcugggaggaccuggugcgcuaccugcaaauggcccgcaagaaggccagagagagcuacaucgaauccgagcugaucuauucguacgccaaaacgggccgauuggccgaccucgaagaauucaucagcggucccaaucacgccgacauccaaaaaaucggcgacagaugcuucgacgauaaaauguacgacgccgccaaguuguuguacaacaacgugucgaacuucgcccggcuggccaucacgcuggugcaccugaaggaguuccagggggccgucgacagcgcccgcaaggcgaacagcaccaggacguggaaggaggugugcuucgccugcgucgacgccgaggaguuuaggcucgcgcaaaugugcggcaugcauaucgucgugcacgccgacgaguugcaggauuugauaaauuauuaucaagacagagguuacuucgaggaguugaucggccuguuggaggccgcuuugggguuggagagagcgcauaugggaauguucaccgaacuggcuauauuguauucgaaauauaaaccggcuaggaugcgcgaacaucucgaauuguucuggucgcgcguuaauauucccaaagugcuuagagccgccgaacaggcgcaucugugggccgaauugguguuucuguucgacaaauacgaagaguacgacaacgccgucuuggcgaugaugaugcauccgacggaggcguggcgcgagggccauuucaaagacaucaucacgaaaguggcgaacaucgaauuguacuacaaggcgauucaauucuaucucgauuucaagccgcuguuguugaacgaucuucuguuggugcuggcuccgagaauggaucacacuagagccguggcuuucuucaguaaaaccggccacuuacagcugguuaaaucuuacuuacgaucuguccaaaauuugaacaauaaagcgaucaacgaggcucucaauucucugcuuauagaggaagaagacuuccaggggcucagaacauccauagacgcguucgauaacuucgauaacauagguuuagcgcagagauuagaaaagcacgaauuaaccgaauuuagacgcaucgccgcuuaccuauacaaaggcaacaaccgguggaaacagagcguggaauugugcaaaaaagacaggcuguuuagagacgccauggaauacacgucggaaucgagaaaccaagaauuggccgaggaacugcucgcuugguucuuggacagaaaggcguacgauugcuucucggcuuguuuguaccacuguuacgauuugcugcgaccggacgucauuuuggaauuggcuuggaagcacaacauaauggacuuugcgaugccguuccugauccaggugaccagggaacugacgacgaaggucgagaaauuggagcaguccgacgcucagcgacaaagcgaagcggcggaggagacgaacaagccgaucaugaugccggaaccgcaacuuaugcugacggcugguccgggcauggguauuccgccgcagcaauacaugccccaacagacguacgcccaagugggcuaugcaccgcaaauggccuaccaagguuauccgggcauguaa

SEQ ID NO: 313 - RNA, 3672 nt, Phyllotreta striolata
auguugaccaaguucgaaaccaaaucggcaaggguaaagggacugucuuuccaucccaaaaggccauggauuuuagccaguuugcacaacgggugcauccaauugugggauuaucgaaugugcacgcuucuggaaaaguucgacgagcacgauggaccuguaagaggcauauguuuccacaaucaacagccccuauucgucucagguggcgaugauuacaaaauaaaaguauggaacuacaaacagaaacguugcauuuucacucugcucggccauuuggauuacauccguacgacuacguuccaccacgaauaccccuggaucguauccgcauccgacgaucagaccaucaggauauggaacuggcaaucgagaacgugcauuugcguuuuaacaggccacaaucacuacgugaugugcgccacuuuccauccgagcgaggaucuacuacuauccgcuucuuuggauuccaccguuagaguuugggauauuuccggccugcguaagaagaacguggcacccggccccacgggccucgaagaccaccucaaaaauccgggagccaccgagcuauucggccaagccgaugcuguggugaagcacguuuuggaaggacacgaucgcggagugaacugggcaucguuucauccguuccuaccuuuaauagcuuccggagccgaugacaggcaaaucaaacuauggaggaugaacgauucgaaggcuugggaaguggauaccugcagagggcauuacaacaacgugucuugcguguuguuccauccgagacaggagcugauacuaucuaacggugaagauagaagcauaagggugugggauauggcgaagaggacuugcuugcacacguuuagaagggaacacgaacgauuuugggucaugacgagccauccgaaucuuaauuuauucgccgcuggucacgauggcgguaugguaauauuuaaauuggaacgagaacgaccggcuuauacaguacacgguaacuuacuguauuacguuaaagaaaaauaucugagaaaacucgauuuuaccacgucuaaagacguccccguuauacaaaucagaggcggcgguaaaauuccaguguacagaauguccuuuaaccccgccgaaaacgccguuuuacuaucaacucgcacuucuaaucucgacaacagcacuuacgauuuguacaugauucccaaggaucaagaaagggaagaccacgugccggaagccgaaagcaagagaucguccgggcugaccgccuuguggguggccagaaaucgauucgccguacucgacaggacgcaccaguugaucauuaaaaaucugaaaaacgaagucaccaagaaaguccaaacgcccacuugcgaugaaguuuuuuacgcaggcacgggcaugcuguuguugagagacuccgaacacguuacguuguucgauguccagcaaaagaggacuuuggcucaaguuaaaaucagcaaaugcagauacgucguuuggucaucugauaugucgcaucuggcccuuuuaucuaagcauaacgugacgauuugcaauagaaaauuggauguuuugugcucguugcacgagaauaccagaguuaagucgggugcuugggaugacagcggaguguuuauuuacacuacuaguaaucauauuaaauauacauugaaaaauggugaucacggaauuauuagaacgcucgaucuucccauuuacauaacuagaguaaaagguagccagguguucuguuuggacagggaauguaagccucgcuuauuaguaaucgaucccaccgaauacaaauuuaaacucgcguugaucaaucacaaguacgaggaaguuuuguacauggucagaaacucucgauugguaggccaaaguauuauauccuacuugcaacaaaaaggauauccggaaguagcuuugcauuuugugaaagaugauaaaacuagauuugcucuggcuuuggaaugcggaaacaucgaaaucgcauuagaggccgcuaaagcucuaaacgauaaaaauuguugggaucaauuggcgcaagccgccuuguggcaaggcaaccaccaaaucguagaaaugugcuaucaacguacgaagagcuucgaaaagcuaucguuccucuauuugaucaccggcaauuuggagaaacugagaaaaaugaugaaaaucgcggaaauccgaaaggccagaucgucucaguaccacgccgcauugcugcugggcgaucucgaagagcgcgugaaacuccucaaagccuccaaucaauuaucccuggcguauuugacggccgccacgcacggcaugcgagaggaggccgaacagcucaaagaacaaaucggcgacgauaagaaacugcccgacgucgaucccgacgcgaaguucuugaaacccccuccgcccauccaacaagcagaguccaauuggccuuuacucacagucagcaggaguuucuucgagaacaccgccgccgcggcgaccgccuccgccaacaugaaaucccucauggccgagcccguuuccgacgugggaauggaggacgcccagggcuggggcgacgacgacgaauuggagcuggaucccgacgagaagaaggccgaagucgcggccgccgggggcggcgacggcgagggcggcugggacguggaggacgaagguuuggaaauaccggaucucggaccugcggcgacgguggaggcggaggguaauuucgugcauuugcccacccaagggccgucugcgcuugugacuuggacgaagaauucgcaguugguggccgaucacguggcggcggguucguucgaaucggccgcucgauugcugcacgaucaauugggaguggugaauuucaggccuuacgaaaguuuguucuugaauuuguacaguacuucgaagacggugucuucuuggcagcaaaacguaccgccuucguucaguuacccuuugaggaauuggaaagaggcgaauauuaaaaaccaguugcccgcuucgggagugaaauuaaacgauuuagucgcuaaauugcagguuugcuaucaacugaccaccggugguaaauucacggaagccaucgagaaacuacaaacucugcugcugucgguuacgcuucucgugguggauaacaaacaagaaauuuccgaggcucagcaguuacugagaauagccagcgaguauauuugcggauugcaaauggaaacuuugaggaaaaccuugccgaaaacaucggccgaagagcagaagcgccagugcgagauggccgcguauuuuacccauuguaaacuacagccgauacaucaaauccugacgcuuagaacggcgcucaacauguuuuucaagcucaaaaacuacaaaacugccgcuuccuucgccaagaggcucuuagagcucgguccgagacccgagguggcccagcaagcuaggaagauauugcaagcgugcgauacgaaucugaccgaugacuuccaauugcacuacgacgagcacaauccuuucaacuugugcgggcacucguacacgcccauuuacaggggcaaggccgaagagaaauguccacugugcgguaccuccuauuuaccuaaauauaaagggguguuguguaauauuugcaaaguggcggaaguuggaaaggauacgaucggguugaggauuagcacgcaccaguuuagguaa

SEQ ID NO: 314 - RNA, 552 nt, Phyllotreta striolata
augggccgauacgcucgcgaacccgacaaugcggcgaagucuugcaaagccagaggcucuaaccucagaguccacuucaagaauacgugcgagaccgcgaacgccauaaggaagaugccccucaagcgggcaguggccuauuugaagaacguagucguccaaaaagaguguauuccauucaggagguucaacggaggaguaggccguugugcccaagccaagcaauucggcaccacacagggaagguggcccaagaagucagccgaauuccuguuacagcuccucaggaacgccgagagcaacgcagauuacagcgggcuugaugucgauaggcuagucguagaacacauucaaguuaaccgagcugcuuguuugagacgucguacguacagggcucacgguaggaucaauccguacaugucaucgcccugucacaucgaacucugguuaaccgagggagaaucgucaccugaggcuccuaagaagagcaacaaaaagaaggcaacggagaagaagagacccaagucguccguugcugcaguagcgcauuga

SEQ ID NO: 315 - RNA, 315 nt, Phyllotreta striolata
auggugaacguuccgaaacaaaggcguacauuuugcaaaaaaugcaaaguccacaagcugcacaaggugacgcaguacaagaaauccaaggaacgucacgcugcgcaggguagaaggcguuaugacagaaaacagcaggguuucgguggucaaacuaaaccuauuuucaggaagaaggcaaaaaccaccaagaaaaucguguugaggauggagugugcagauugcaaguacagaaagcaguucccuuugaagagaugcaagcacuucgaacuuggaggugacaagaagcgcaagggccagaugauccaguucuaa

SEQ ID NO: 316 - RNA, 773 nt, Psylliodes chrysocephala
ggaaauacggugcaauggaaaaugugcacuuuaacuccaaguaccacuauagcgcuguuuuucgaaguggucaaucagcauucugcaccgauuccucaaggaggaagaggaugcauacaauuuauuacucaauaucagcauucuaauggccagagaaggaucagagugaguaccauagcucgcaauugggcggacgcgaccgcgaauauucaucacauuagcgcuggguucgaucaagaagcggccgcuguaauuauggccaggauggcuguauacagagcggaaucggacgauaguccugauguucuuagauggguggacaggauguugauuagauugugucaaaaauucggagaauacaacaaggacgacgcgaauucguucagauugggucaaaacuuuagccucuauccccaauucauguaccaucugagacguucucaauuccugcaaguuuucaauaauucaccggacgaaacgucguauuaucggcacauguuaaugagagaagaucugacgcagucuuugauuaugauccagccgauuuuguacaguuacagcuucaacgggcccccggaacccguucuguuggauacgaguucgauucaaucggagaggauauuauugauggacacuuucuuccaaauauugauauuccacggagagacaauagcucaguggcguaacuugaaauaccaagauaugccggaauacgaaaacuuuagacaacuguuacaagcacccguggacgaugcucaggaaauauugcagac

SEQ ID NO: 317 - RNA, 751 nt, Psylliodes chrysocephala
aaaaauuggauugucaguggaucugaugauaugcagauaaggguuuuuaauuauaauacccuagauagaguucaugccuuugaagcgcauucugauuauguuagauccauuguuguacauccuacacagccauauauucuaacaaguagugaugauaugcuuaucaaauuauggaauugggaaaaagcaugggccugccaacagguguuugaaggccacauccauuauauuaugcaaauuuccauaaacccuaaagacaacaacaccuuugccagugcuucuuuagacaggaccauaaaagucuggcaauugggugcuuccacugcaaauuucacucucgaaggucaugaaaaaggaguaaacuguguugauuauuaccauggaggugauaaaccauaccuaauaucuggugcagaugauagauuagucaaaauuugggauuaccagaauaaaacuuguguccaaacuuuagaaggacauggacaaaacguuacugcuguuuguuuccauccugaacucccaauagcucuuacuggaagugaagaugguacuaucagaguuuggcaugcaaauacucacagauuagaaagcaguuugaacuauggcuuugaaagaguauggacuauuuucugcuugaaggguuccaauaauguugcuuuagguuaugaugaggguagcauuuuggugaaaguugguagagaggaaccagcuguuaguauggaugcaagugguggaaaaauuauuugggcua

SEQ ID NO: 318 - RNA, 787 nt, Psylliodes chrysocephala
ugucagauaugaagcugcugguacacuuguaacacuuucaagugcucccacagcaguaaaagcagcugcuaguuguuauauugaacuaauuaucaaggaaagugauaauaauguaaaguugauugucuuggacagauugauugcccuuaaggaacaucccagccaugaaaggguuuugcaagauuugguuauggauauauuaagaguguugcaagcuccugacuuggaaguucgcaaaaagacuuuaaaccuagcacuugaacugguaucaucucguaauauagaagaaaugguuuugguucuuaaaaaggagguaucaaaaaccguagauagcgagcacgaagauacaggaaaauacaggcaguuacuuguuagaacacuucauucuuguuguauaaaauucccagauguagcuguaacugucauuccuguuuuaauggaauuuuugucugauaguaacgaguuagcugcuacugacguguuacuauuuuugagagaggccauacagaaguuugauaaucugcaaccacuuauuauugagaaacuucuagaaacauucaaagauauaaaaucuguuaaagugcauagagcagcucuuuggauauugggagaauaugccacuucugucucagacauugaagcuguuauuaaagaaauuaaucaaaccuuaggagaagcuccucuguuggaaacugaacaaaaacuaauuucuggagagacagacgacacaacuacaguuccaacagguggagcuacaacuuugguuacuucagaugguacuuacgcc

SEQ ID NO: 319 - RNA, 474 nt, Psylliodes chrysocephala
ggaagccuccgauacuauugaaaauguaaaagcaaaaauucaagacaaagaaggaauucccccagaucagcaacguuugauuuuugcugguaagcaguuagaagauggccgcacccugucugauuacaauauucagaaagaaucaacuuugcacuuaguuuuacgguugagaggaggaaugcagauuuuugugaagacuuuaacaggaaagaccaucacauuagaaguggaaccauccgauucaauugaaaauguaaaagccaaaauucaagacaaagaaggaauucccccagaccaacaacguuuaauuuucgcaggaaaacaauuagaagauggaagaacuuugucugacuacaauauucaaaaagaaucuacacugcauuuaguucuucgucuuagagguggaaugcagauuuucgucaaaacucuuacugguaagaccauaacuuuggaaguggaagccucugauacaau

SEQ ID NO: 320 - RNA, 454 nt, Psylliodes chrysocephala
gcacaaagcguuaucguuaugaaaacagaugaaaauaagcuguuuaaacuuucuaacaaacucguaauggcuguaucaggagaauccggcgauacuacacaauuugcagaguauauagcuaaaaauauucaauuauauaaaaugagaaauacauaugaauuaaguccugcagaagcagcugcuuuuacucguaggaaucuagcugauacacuccgaagcaggaguccuuaccauguaaauuuacuuuuggcuggauaugaugcaaaggaugggccacaauuauauuacauggacuacuuggcuucuauagccaaaguggauuaugcugcucacggcuauggaggcuucuucucacuauccauaauggaucgcaacuauuugaaaaaccucuccaaacaacaagguuaugaauuauugaaaaaauguguuaaagagguucagaagagacugauca

SEQ ID NO: 321 - RNA, 382 nt, Psylliodes chrysocephala
aggccucuaaagcaaagaaggccaagaaagguuucaugacaccugagagaaagaagaaacuuagguuacuguugagaaagaaagccgcugaagaacuaaagaaagaacaagaacguaaagcugcagaaaggaggcguaucauugaagaaaggugugguaaacccaaauugaucgaugaugccagugaagcaaaacuuaaaacaguuuguaaaacauaucacgaacgaauugacaaacuagaagauaagaaauuugaccuggaaaaugaaguggaauucaaagauuuucagaucucggaauuaaacagucaaguaaacgaccucagaggcaaauucgucaaaccaacauuaaagaagguauccaaauacgaaaacaaauucgc

SEQ ID NO: 322 - RNA, 573 nt, Psylliodes chrysocephala
ucucgaaccaagauguuucauaagaaagcuuuauacaaauuuauugguaaaaaaguagccgcugaaaaaaaaccuauuaagccacguguuaucgagaaacagaucgguggcgaaaaaaacgguggaaaacguuauguauugguagaaaagcgucgggcaguuuacccuacacaagacagaaucaagaagcgaccagcuaaacaguuauuuaaggaucaugccagaacauuaagagccucgaucagcccuggaacaguacuuauucuuuuggccgguucacauaaaggaaagcgugucguuuucuuaaaacaacuuaaaucggggcugcuccuuguuaccgguccguuuggcauuaacgcuugcccucugaggagaaucagucaaagauauguuauugguacacagacaaaaauugacguuagcgguguuaaauuaccggaaaauauuaacgaugaauauuucaagagacaaagacagaagcgggcgaaaaaagaagagggagacauuuuucaaaccaaaaaacaaggauauaaagucagcgaucaaagaaaaacugaccagaaagaagucgau

SEQ ID NO: 323 - RNA, 544 nt, Psylliodes chrysocephala
cccacaguacuggaacuucuauaauggcagcagaauuugauggcgguguuguuauaggagcugauucucgaacaacuacaggggcguauauugcgaauagaguagcagauaaauuaacgaaaauaacugaucauauuuacuguugucguucuggaucugcugcugacacccaagcuauugcugauauuguagcauaucacuuaaauuuccaugguauggaauugggugaggaaccucuuguagaaguaggagcagcaaucuucaaggaacuuugcuacaacuacagagauucguuaauggcuggaauacucguagcagguugggacaagaaaaaagguggucaagucuauuccauacccauugguggaaugugcguuagacaagaaguuucuauuggagguuccgguuccagcuauguuuaugguuauguagaugcuaacuuuaaaccuggaaugucaaaggaagacugcguuaaguuuguuucaaauacuuuggcucuagcaaugucuagagaugguucaucuggagguguugucagaauagg

SEQ ID NO: 324 - RNA, 695 nt, Psylliodes chrysocephala
uuagaaaaucagauugccgucauuaaauacgugauacucuuuaccaacgucuugcuaugggcccuuggcggagcaauuuuuggucuuugccuuuggcuaagguucgaagagggcauccaagaauggcuucagaaauuagauuccgagcaauuuuacaucgggguuuauguacuuauagucgcuucagugaucgucaugauuguguccuuucugggauguauuagugcccugcaggaaaguucguuugcccuuuuacuguacauuggcagccaagugcucaguuuuauauucgguuuauccgguucagcuguucuucuggauaacagcgccagagauucccacuuccaacccagaauccgagaaaguaugcgacgucuuaucaugaaugcucaucacgaggcauccaaagaaacacuugccaugauucaggaaaauauugguugcuguggcgcugauggagcaagugauuacuuaucucugcaacagccguugccaacucagugcagagauacaguuacagguaauccuuauuaccauggauguguuaacgaacucacaugguucuuugaagagaaaugcggauggauugcaggauuagccaugacgauuuguuuuauugcuguuuuaaacgucguucuuucaacaguacuuauucaagcucuaaagaaagaagaggaacaagccgauucuuacag

SEQ ID NO: 325 - RNA, 716 nt, Psylliodes chrysocephala
cguccugaggucucuaguuggucuguaucggggucuaacuacucccgauuacgucaauaugugccagugucuaauuuucuuagacgacccucucccaguggcugaaaucuuagauaaacucgugucugguaaagaagauacugaacugauggccuaccaaauagcauucgaccuauacgagucagcaacucagcaguuuuuggagaggguauugguagcucuuagagcuacugcuccgauuccgucgcugcuggaagagaaggcuaaacccaagauuggcgaucaagccaguagcacuucagcugaggcuucgacuggcgaugccacuguuagugaaucaaagacugaaguuguuaaggaagagaaaucuauugauaguuugucugaucaugaaaaagaacaccagaaacguaucgaaaaguuacacaccauucuuucaggcgaaguguccaucgaacuucaucuucaauuucuuaucagaucuaaucaugcugaucuccuuauuuugaaacaaacaaaagaaaccguccgcguuaguauuugucauacugcuaccguuauagcuaaugcuuucaugcacagcgguaccaccagugaucaauuuuuaagagauaacuuagaaugguuagcaagggcuacaaauugggccaaacucacggcuacggcuucucuuggcguaauucacaggggacacgagcaagaagcuuugaccuuaa

SEQ ID NO: 326 - RNA, 250 nt, Psylliodes chrysocephala
caaagauccaggacaaggaagguaucccuccugaccagcagcgauuaaucuucgcuggaaaacaacucgaagauggacguacucuuucagacuauaauauccagaaagaauccacccuucauuuggugcuccguuugagaggagguaucaucgagcccucucugcgucuccuagcucagaaauacaacugcgacaagaugaucugucgcaaaugcuaugcuagguuacacccuagggcuacuaauugcag

SEQ ID NO: 327 - RNA, 752 nt, Psylliodes chrysocephala
ugucaaucucaaacguaccaccagcagagaauuagcuccagcuguaaguguucugcaacuauucugugguucuccaaaaccaacacuaagauuugcugcagucagaacauuaaaucaaguagcuauuucucacccugcagcuguuacagcuugcaaucuagauuuagaaaacuugauuacugauucuaacagaucaauugcuacuuuggcuauaacuacucuguuaaaaacuggugcugaaucaucuguagaccgucucaugaaacaaauugcaaguuucguuucugaaaucagugaugaauucaaaguuguaguuguccaagccaucaaggcacuagcucucaaguuuccucgcaaacauagcacacuaaugaauuuccugucagccauguuaagggaugaaggaggucuggaauauaaagcaucuauugcugauacuaucauaacuauuauugaagacaauccagaagcuaaagagucagguuuggcacauuugugugaauuuauugaagauugugaacauguuucuuuagcuguaagaauuuugcauuuguugggaagagaggguccaaagacaaagcaaccuucaagauacauccguuucaucuacaaucgaguuauuuuggaauguccaucuauaagagccgcggcaguguccgcaauggcgcaauucggcgcuuccuguccagauuuguuagaaaacauucaaguuuuacuugcaagaugucaaauggauucggaugaugaaguua

SEQ ID NO: 328 - RNA, 701 nt, Psylliodes chrysocephala
cuauggagguggaugagagaccugcugaacaguacucagauauuggagguuuagauaaacaaauccaagaacugauugaagcuguuguguuaccaaugacccauaaagauaaauuuguuaauuuggguauucaucccccaaaaggcguuuuacuauacgggccaccuggaacuggaaaaacccuccuugccagagcaugugcagcucaaacaaaaucaaccuucuuaaaauuagcuggcccccaauuaguccagauguuuauuggugacggcgccaagcuugugagagaugcauucgcuuuagccaaagaaaaaucucccgcuaucauauuuaucgaugaacuggacgcaauaggcacaaaaagauucgauucugagaaagcgggugacagggaagugcaacguacuauguuggaguugcugaaccagcuggauggguucaguucaaccgccgauaucaaagugauagcugcuaccaaucgugucgauauuuuagacccugcucugcuucgaucugguagauuagacagaaagauagaauucccgcaucccaaugaagaagcgagggcuagaaucaugcagauucacuccaggaaaaugacugucaauccugaugugaauuuugaagaacuggcuaggucuacagaugacuuuaauggagcccagugcaaggcuguguguguugaagcugguaugauugcu

SEQ ID NO: 329 - RNA, 474 nt, Psylliodes chrysocephala
acacauuauuagcuaagaaaaaugccucuaagaauaaacgaguggcccuucaagcucuuaagaagaagaaaagauuggaaaagacucaacugcaaaucgauggaacacuuacaacuauugaaaugcaaagagaagcccucgaaggagcuaguacuaacacagcgguuuuagauucuaugaaaaaugcugcugaugcccuuaaaaaagcacacaagaaccuggauguugauaauguucaugauauaauggaugauauagcggaacaacacgacauugccaaugagaucacaaacgcuauuaguaauccaguugguuucucagaugauauggaugaagaugaauuagaaaaggaacuggaggagcucgaacaagaagguuuagaagaagauuuacucaagguucccggaccuacagaacuuccagccgugcccgcuggagcuauugcuaagccggcaguuguuaaaccugcagcua

SEQ ID NO: 330 - RNA, 473 nt, Psylliodes chrysocephala
ugcagaugauacuuacacggaaaguuauauuaguaccauuggaguagauuuuaaaaucagaacaaucgacuuagauggaaaaacuauuaaauugcaaauuugggacacugcagggcaagaaagauuuagaaccauuaccucgaguuacuacaggggggcgcacgguaucauuguaguguacgauugcacggaccaagauucauuuaacaacguuaaacaauggcuggaagaaaucgaccguuacgcaugcgauaacguaaacaaauuacuuguagggaauaaaagugaucuuacgacuaagaaaguugucgauuucaacacggccaaggaauacgcugaucaguuagguaucccauuuuuggagacgucggcgaagaacgccacgaacguagagcaggccuuuaugacaauggcggccgaaaucaaaaauagaguaggacccccaucaucugccgcagaccaaggaaauaaag

SEQ ID NO: 331 - RNA, 511 nt, Psylliodes chrysocephala
agaucugucaguucaagcucgucuugcucggcgagagugcugucgguaaaucgagcuuggugcugagguucgucaaaggacaguuccacgaauaucaggaaagcaccaucggagcagcuuuccuuacacaaaccauuugccuggacgauacaacugucaaauuugaaauaugggauacagcgggacaggaaagguaucacaguuuagccccuauguacuauaggggcgcacaggcagcuauaguggucuacgauauuaccaaccaagacacguucggcagggcgaagacgugggugaaagaacuucagaggcaggccagccccacaaucgugauagcuuuggcuggcaacaagcaggacuuggccaacaagaggaugguggaguaugaagaagcgcagacuuacgcggacgaaaacggauuguuauuuauggaaaccucugcaaagacagcaaugaauguuaacgauauauuuuuagcaauagcuaagaaauugcccaagaaugaacaaac

SEQ ID NO: 332 - RNA, 449 nt, Psylliodes chrysocephala
guagguuuagaugcugcugguaaaaccacaauuuuauauaaacuaaaauuaggagaaauuguaacaacuauaccaacuauuggauuuaauguggagacuguagaauauaagaauaucagcuuuacggugugggacguggguggucaagauaaaauuaggcccuuguggagacacuauuuucaaaauacacaaggccuaaucuucguaguggacagcaacgauagggagcguaucaccgaggccaaagacgagcucaugcgcaugcucgccgaagacgagcuccgggacgccguacuucuaauauucgccaacaagcaggaccugccuaacgccaugaacgcggccgaaaucaccgacaagcucggucugcauucgcugcgcaaccgcaauugguacauccaggccacgugcgccaccagcggagacggucucuacgaaggucucgauug

SEQ ID NO: 333 - RNA, 82 nt, Psylliodes chrysocephala
  misc_feature (1)..(82): n is a, c, g, or u
nnnnnnnnnnnnnnnnnnnnnnnnnnnnnnnnnnnnnnnnnnnnnnnnnnnnnnnnnnnnnnnnnnnnnnnnnnnnnnnnnn

SEQ ID NO: 334 - RNA, 702 nt, Psylliodes chrysocephala
aacaugaacguuuuugggucaugaccagucauccuaaucugaauuuauucgcugcuggacaugaugguggaauggucaucuucaagcuagaaagagaacgcccagcuuauacgguacacggcaaccugcuguacuacguaaaagaacgguuuuugagaaaacucgacuuuaccacguccaaagacgugcccguuaugcaaaucaggggcggagguaaaauuccgguauacagaaugucuuuuaaucccgcagaaaaugccguucuacuuucgacgcgcacuuccaauuuggauaacagcacuuacgaucuguacaugauucccaaagaucaagaacgcgaagaucacguuccagaggcagaaaguaagagauccucugguuugacggcucuuuggguggcgagaaaccguuucgcugucuuagauaggacccaccaauugaucaucaagaauuuaaagaacgaagucaccaaaaagguccaaacucccacgugcgaugaaguuuuuuaugccggcaccggcaugcuacugcuuagagauucggaacacguaacguuguucgacguacaacagaaaaggacuuuggcucaaguuaaaauaaauaaaugcagauacguggucuggucaucggauaugucgcacuuggcgcuucucuccaaacauaaugugacaguuuguaauagaaaauuagacguccugugcu

SEQ ID NO: 335 - RNA, 410 nt, Psylliodes chrysocephala
uaagaacacaugugagacggcaaaugcuauuagaaaaaugccucucaaaagggcaguaucguacuugaagaauguuguuguucaaaaggaauguauuccuuucagaagauucaaugguggugugggucguugugcucaagccaaacaguucgguaccacacaggguagguggccgaaaaagucugcagaguuucucuugcaacuccuuagaaaugcagaaaguaaugcugauuacaguggacuugauguagacaggcuagugguagaacacauucaagugaauagggcugcuugucugagacgucgaacguacagagcccaugguagaauuaacccauacaugucuucucccugucauauugaacucuggcuaacugaaggcgaaucuaccccugaucuucccaagaaaa

SEQ ID NO: 336 - RNA, 232 nt, Psylliodes chrysocephala
guccacaagacccauaaaguaacccaauacaaaaaaucgaaggaacgucaugcuucccaagguagaagacguuaugacaggaaacaacaagguuuugguggucaaacgaaaccuauuuuccguaaaaaggcuaagacuaccaaaaagauuguauugaggauggaauguacugauugcaaguucaggaaacaaauuccccuuaaaagaugcaaacauuuugagcuaggaggug

SEQ ID NO: 337 - RNA, 715 nt, Phyllotreta nemorum
cauucaaguggucaaagacgaauuagagugacgacaguggcucgaaacugggcagaugccacuacuaauauucaccacaucagcgcugguuucgaccaagaagcagcagcaguaauuauggccagaauggcgguuuauagagcugaaucugaugagagucccgacguucugagaugggucgauagaaugcugauucgauugugucaaaaauucggagaguacaauaaagacgaugcugguucauucagauugggucaaaacuuuagccucuauccgcaauucauguaucaccuaaggagaucucaguuccugcaaguuuucaauaauucucccgaugaaacaucguucuaucgacauauguugaugagagaagaucuuacucaaucauugaucaugauucaaccgauuuuguacagcuacaguuucaacggcccuccagagccugugcuguuagauacgaguuccauacagcccgauagaauauugcucauggacacguuuuuccaaauuuugauauuccacggggagacuauagcucaauggagaaauuugaaauaucaagacaugcccgaauacgagaacuuuaggcaauuauugcaagcaccuguugaugaugcucaggagauauuacaaacaagguuccccaugccgagauauauugacaccgaacaaggggggucucaggcuagauuuuuauuguccaaagucaauccga

SEQ ID NO: 338 - RNA, 786 nt, Phyllotreta nemorum
ccaauuugaaagccuuacccgaaggagcugaaauaagagacggggaacguuugccgguguccaucaaagacaugggcgcuugcgacauuuacccucagacuauucagcacaaucccaacgggcguuucguggugguuugcggcgauggggaguacaucauuuacaccgcaauggcgcucaggaacaaagcguucgguagcgcgcaggaguucgugugggcgcaggauuccagcgaauacgccaucagagagucggggucuaccaucaggauauucaagaacuucaaagagaagaagaauuucaaaucagacuuuggagcugaaggcaucuauggugguuaucuguugggcgugaagucuguaucuggcuuggcuuucuacgauugggaaacucuggauuugguuagaaggaucgaaauacaaccucguucgauauacugguccgauagcggcaaacuaguuuguuuggccaccgaggacaguuacuucauacuaucuuaugacguugaagaaguucagaaagcaagagauaacaaccagguggcugaugauggaguggaguccgccuucaaucuccuaggugaaguaaacgagucaguucgcacaggucucuggguaggagauugcuucauuuacacgaacgccguaaaccguauaaauuacuucguuggaggugaauuggugaccaucgcgcaucucgauggcccacuguacguacuaggcuacguuccgaaggacgacagacucuauuuagucgacaaagaauugagagugguuagcuaucagc

SEQ ID NO: 339 - RNA, 769 nt, Phyllotreta nemorum
ggagccuuacaaugaaaugcaauugaaaauggaccucgaaaagggcgaagucaaaguaaagauaagggcuuuggaaagaaucauacacaugauauuggcaggcgagagauugcccaacggauuccugaugacaaucauacgaaacguuuugccccuacaagaucaccuggccaagaaacuuuugcucauuuuuugggaaaucgugccgaaaaccacccccgacgguaaauuacugcaggaaaugauccuagucugugacgccuacagaaaggaccugcagcaccccaacgaauuuuugaggggcuccacauugagauuccuaugcaagcugaaggagcccgagcuguuggagccucugaugcccagcauucgaauuugccucgaacacaggcacagcuacguucgaaggaaugccguucuggccauuuuuacgauauacaagaauuucgaauuccucauuccagacgccccugaauugauuucuacuuaucuagacggcgagcaagauaugucuuguaaaagaaacgcuuuccuuaugcuuuugcaugccgaccaagaucgagcccucacuuaccuauccaauugcuuagaucaaguggcuucuuuuggggauauucuacaguugguuauuguugaauugauauacaaagugugccacuccaaccccgccgagagauccagauucauucgaugcauauacaaucuauuaaauucgagcaguccugcuguucgguacgaggccgccgguacucugauuacucuguccagc

SEQ ID NO: 340 - RNA, 424 nt, Phyllotreta nemorum
aacuggaagauggaagaaccuuaucugacuacaauauucaaaaagaaucuacucuacauuugguacuucgucucagaggagggaugcaaauauucgugaaaacucucacugguaaaacuauuacucuugaaguugaaccaucugauaccauugagaacgugaaggccaaaauucaagacaaagaggguauucccccagaucagcaacgucuuaucuuugccggaaagcagcuggaagauggacgaacauuguccgacuacaacauucagaaagaaucuacucuacacuugguacuucgucuaagggguggaaugcaaauauuuguuaaaacucucacugguaaaacuauuacucucgaaguugaaccaucugauacuauugagaacgugaaggccaaaauccaagauaaagagggaaucccacc

SEQ ID NO: 341 - RNA, 406 nt, Phyllotreta nemorum
gcuguucaaauuguccaacaagcuuguuauggcuguauccggagagucuggcgauacuacacaauuugccgaguacauagcuaagaauauucagcuguacaaaaugagaaauaccuacgaacuuagcccaucggaagcagcuucguuuacucguaggaaucucgcugaugcucuuagaagcagaagcccuuaccacguaaauuugcugcuggcuggauacgacgagaaagaaggcccccaauuguacuacauggacuacuuggcgucgaccaucaaaguuaauuacgcugcucacgguuacggaggcuucuuuucguuguccaucauggauagaaacuacagcaaaucucugaguagagaagaaggcuaugaguuguugaaaaaaugcgugagagaaguucaaaag

SEQ ID NO: 342 - RNA, 417 nt, Phyllotreta nemorum
caugaccccugaaagaaagaagaaacuuagguuauuguugagaaagaaagccgccgaggaauugaagaaggaacaggaaaggaaagcggccgagaggagacgcaucaucgaagagcgcugcggaaagcccaaauugaucgaugacgccaaugaagaacaacuuaagaguauuuccaaaauguaucacgagagaauuugcaagcuggaagaccagaaauucgauuuggaauaucuagucaaaaagaaagacauggagaucgcggaauugaacagccaagugaacgaccucagaggaaaauucgugaaaccgacguugaagaagguguccaaauacgaaaacaaauucgccaagcugcagaagaaggccgccgaauuuaacuuccgcaaccaacugaaaguggucaagaagaaggaguu

SEQ ID NO: 343 - RNA, 613 nt, Phyllotreta nemorum
caagccuggaaaaccuagaaauuaugacuuaggaaaugguguuaugagguuuucaagaacaagaauguuccauaagaaggcuuuguacaaauuuauugguaaaaaaguuaaggcuaccaagaaaccacagaagccucacguuaucgaaaagccaauuaauggagaaaagaacggaggaaagagauucgucuuagucaagaagcguagggcuuacuauccuacucaagacaagauuaagccgaggccugcgaagaaguccuucugccagcacaaacguucacuuagaacaaccauaacacccgguacuguucuuauuuuguuggcugguucucacaaggguaagaggguuguuuuccugaagcaacuguacucuggucuuuuacuuguuacugguccguuuuccauuaaugccuguccauugagacguauuagucaacgauacguuaucgcaacauccaccaaaaucgauguaagcgguauuaaaguucccgacaacuuuaaugaugacuauuucgcgagaaaacgcgucaagagggcgaagaaagaggaaggugacauuuuccagaccaagaaagugguuuacaaagcaagcgaggaaaggaaaaaggaccag

SEQ ID NO: 344 - RNA, 331 nt, Phyllotreta nemorum
cagcacaggaacauccauuauggcaucagaauucgacggcggagucgucauaggagccgacucacguacaaccacuggggccuauaucgcaaacaggguguccgacaaacuaacgagaguuaccgaucacauuuacugcugcaggucagguuccgcugcugauacggaggccaucgcagacaucguaggcuaccauuugaacuuccacgggauggaguugggcgaagagccgagcguagaagugggagcggccauauucaaggagcugugcuacaacuacagggacuccuugauggccggcauacugguggccgguugggauaagaagaaa

SEQ ID NO: 345 - RNA, 598 nt, Phyllotreta nemorum
uuuaccaacgucuugcaaugggcccucggcggcgcaaucuuugcccuuugccuuuggaugagguucgaggagggcauccaagaauggcugcagaaauuggauuccgaacaauuuuacaacggaguuuauguacuuauagucgcuucgcugaucgucaugauuguguccuuucugggauguauuagugcccuacaggagaauacggugacccuuuuggccuacaucggcacgcaagugcugagcuucauauucgguuuagccgguucggcuguucuucuggauaacagcgccagagauucccacuuccagccgaggauucgggagagcaugcgacgucuuaucaugaaugcucaucacgagccauccagaguaacgcucgccaugauucaggaaaauaucggcugcugcggugcugacggagcagaagauuacuugucgcugcaacagccauuaccgagccaaugcagggacaccgucaccgguaaucccuauuuccacggaugcgucgacgagcucacgugguuuuucgaggaaaagugcgccuggauagccgcauuggccaugugcauuugcuucuuuaacguuuuuagcaucgugc

SEQ ID NO: 346 - RNA, 722 nt, Phyllotreta nemorum
guuaguauuugccacacugcuacagucauugcuaacgcuuucaugcacagcgguaccaccagcgaccaauuuuuaagggauaauuuggaauggcuagccagagcaacgaauugggcgaagcuaacagcaacagcgucucugggcgucauccaucgagggcacgagcaagaggcuuugacucucaugcaaagcuauuugccgaaggaaguugggccgaguucgggauacuccgaaggcggcgguuuguacgcucucggucucauucacgccaaucacggugcuaacauaaucgauuaccuucuuggucaacucaaagacgcccagaacgagaugguuagacacggcgguuguuugggccucgguuuggcugcuaugggcucgcagaggcaggauguguacgaacagcucaaguucaaucucuaucaggacgacgcuaauacuggagaggcugccggaaucgcgauggguaugguuauguugggauccaguaauccaacuacuauuauggauaugguagcguacgcacaagagagccagcacgaaaaaauccuucgcggcuuggcugucggcauaaguuucaccauguacggucgauuagaagaagcugauaccuugauacaacagcuuacuuccgauaaggaucccauccugagaagauccggcauguacacauuagcuauggcuuauugcgguacagggcauaaccaggcgauuaggaaauu

SEQ ID NO: 347 - RNA, 206 nt, Phyllotreta nemorum
aaaugucaaggcgaaaauccaagacaaagagggaauuccuccugaccagcagcgauugauuuucgcagguaaacaacucgaagauggccguacccuuucagauuacaacauccaaaaggaguccacccuccacuuggugcugcguuugagaggaggaaucaucgagcccucucugcgucuguuggcccaaaaguacaauugcgaca

SEQ ID NO: 348 - RNA, 726 nt, Phyllotreta nemorum
aagaagaagauuccggcaaugauuuucccuacuucgauuucaucgaguccuguuugaggcacaaauccgagaugguaguuuacgaagcagcccacgcgaucgucaaucucaagcgaacgacuagcaaagaauuggcgccggcugugagcguauuacaacuguucugcggcucgccgaaggcuacuuugagauucgccgccgucaggacucugaaucaaguggccauaucccauccggccgcugugaccgcuugcaauuuggauuuggagaauuugauuaccgauucuaaucgaucgauugccacgcuugcuaucacuacuuuauugaaaacuggugcugaaucgucuguugaucgacucaugaagcaaauagcgaguuucguaucugaaauaagcgaugaauucaaaguuguggugguccaagcgaucagagcacuggcucuuaaauucccucguaagcacaacacucucaugaacuucuuaucggcuaugcugagagacgaaggugguuuggaauacaaagccuccauugcagacaccauaaucacuauuaucgaagauaauccugaagcuaaggaaucaggucuggcucaucugugcgaguuuauugaagauugcgaacacguuucucuagcuguuagaauauugcaucugcuagguagggaaggaccgaaaaccaaacaaccuucuagguacauucguuucaucuacaaccgggucaucuuag

SEQ ID NO: 349 - RNA, 315 nt, Phyllotreta nemorum
uccaaagaaccauguuggaacuguugaaccaacuggacgguuucagcuccacuuccgacaucaaagucauagcagcuacgaaucguguggauauucuggaucccgcucugcuucggucuggucgguuggacaggaagaucgaauucccgcaucccaacgaagaggcgagggcgagaaucaugcagauucacuccaggaaaaugacggucaacccggacgugaacuucgaggaauuggcuagaucuacggacgacuucaacggggcucaguguaaggcugugugcgucgaagcugguaugaucgcucucagacgua

SEQ ID NO: 350 - RNA, 455 nt, Phyllotreta nemorum
gcuauccaaaagcuuagggaaaccgaggaaauguuauauaaaaaacaagaguuuuuagaaaagaaaauagaggaauacacauuaguagccaaaaagaaugcaucaaaaaauaaaagaguugcgcuccaagcgcucaaaaagaaaaaacgacuggaaaaaacucaauuacaaaucgauggaacacucacuaccaucgaaaugcaaagggaggcccucgaaggggccagcaccaacacagccgucuuagacuccaugaagaaugcugcugaagcccuacagaaagcccacaaaaacuugaaugucgaugauguccaugauaucauggaugacauagcugaacagcacgacauugccaacgagaucacuacugcuauuagccagccgguuggcuucaacgaugaucuagacgaggacgaauuagaaagcgaacuagagaagcucgaacaagaaggauu

SEQ ID NO: 351 - RNA, 440 nt, Phyllotreta nemorum
gcuauugagauuugcggaugauacuuauacggagaguuauauuaguacuauuggaguagauuuuaaaaucagaacaaucgauuuagaugggaaaacaauuaaauugcaaauuugggauaccgccggacaggaacgauuuagaacuauaacaucgaguuacuacaggggcgcgcacggaaucaucgucguguacgauugcacagaccaggacuccuucaauaacgugaaacaaugguuggaggaaaucgaccguuacgcaugcgacaacgucaauaaauuacuuguagggaauaaaagcgaucuuacgacuaagaaaguugucgauuucaacacggccaaggaauacgcggaucaguugggcauaccguucuuggagacaucggcgaagaacgccaccaacguagagcaggccuuuaugacgauggcagcggaaauuaaaa

SEQ ID NO: 352 - RNA, 170 nt, Phyllotreta nemorum
aauaagcaggauuuggccaacaagcggaugguggaguacgaggaggcgcagaccuacgccgaugaaaacgguuugcuguucauggaaacaucggcgaaaacggcgaugaacguuaacgauauauuuuuagcaauagcuaagaaacugcccaaaaacgaacaaacauccgg

SEQ ID NO: 353 - RNA, 406 nt, Phyllotreta nemorum
augguagguuuagaugcugcugguaaaaccacaauuuuauauaaacuaaaauuaggagaaauuguaacaacuaucccaacuauugguuuuaaugucgagacuguagaauauaagaauaucagcuuuaccguuugggaugucgguggucaagauaaaauuaggccauuguggagacacuauuuccaaaauacccagggccuaaucuucguaguggacagcaacgacagggagcguaucaccgaggccaaagacgagcugaugcguaugcuggccgaagacgagcucagggacgccguucuccugauauucgccaacaagcaggauuugccgaacgccaugaacgccgccgaaaucaccgauaagcucgggcuacauucguugcgcaaccguaacugguacauacagg

SEQ ID NO: 354 - RNA, 738 nt, Phyllotreta nemorum
uugaggaguugauuggucuguuggaagccgccuugggguuggagagggcccacauggggauguucaccgaacuggcuauauuguauucgaaauacaaaccggcuaggaugcgcgaacaucucgaauuguucuggucgcgcguuaacaucccuaaagugcucagagcagccgaacaggcgcaucugugggcugaauugguguuccuguucgacaaauacgaagaguacgauaacgccgugcuggccaugaugacgcaucccaccgaggcguggcgcgaggggcacuucaaagacaucaucacgaaaguggcgaauaucgaauuguacuacaaggcgauccaauuuuaccuggauuucaagccgcuguuguugaacgaccugcugcuggugcuggccccuagaauggaucacaccagggccguggcuuucuucaccaaaaccggccaccugcagcuggucaaauccuaccuacggucuguccaaaauuugaacaauaaagcgaucaacgaggcucugaauucucugcugauagaggaagaggacuuccaggggcucagaacauccauagacgcguucgauaacuuugauaacauagguuuagcccagagauuagaaaagcacgaauuaaccgaauuuagacgcaucgccgcuuaucuguauaaaggaaacaaccgguggaagcagagcguggaauugugcaagaaagacaggcuguucagggacgccauggaauauacuu

SEQ ID NO: 355 - RNA, 793 nt, Phyllotreta nemorum
ugaccagaccaucaggauauggaacuggcaauccaggacgugcauuugcguucuaacgggccacaaucacuacguuaugugcgccacuuuucauccgagcgaagauuuauuguuaucagcuucguuggauucuacuguuagaguuugggauauuucgggacugcguaagaagaauguaucacccggucccucgggccucgaagaucaccucaagaauccuggugcuacugagcuauucggccaagccgaugcaguaguaaagcauguuuuggaaggacacgaucgaggagugaacugggcuucauuccaucccuuccuaccucuaauagcuucuggagcugaugauaggcaaauaaagcuguggaggaugaacgauucgaaagcuugggaaguggauacuuguaggggccauuacaacaacgugucuugcguguuguuucauccgagacaggagcugauucugucuaacggcgaggaucggagcauaagggugugggauaugucgaagaggacuugcuugcauacuuuuagaagggaacacgagagauuuuggguuaugacgagccacccgaauuugaauuuauucgccgcuggucacgacggcgguaugguaauauuuaaauuggaaagagaacgaccagcuuacacaguacacggcaaccuacuguauuacguuaaggaaaaguacuugagaaaacucgauuucaccacguccaaggaugucccuguuauccaaaucagaggcggcgguaaaaucccgguauacagaauguccuuuaauccugccgaaaac

SEQ ID NO: 356 - RNA, 279 nt, Phyllotreta nemorum
cuucgaguccacuucaagaauaccugcgagaccgcgaacgccauaaggaagaugccccucaaaagggccguagccuaccugaagaacguagucgugcaaaaagaguguauuccauuuaggagauuuaacggaggagucggccguugugcccaagccaagcaauucggcacgacgcaggguagauggcccaagaaguccgcggaauuucuacuacagcuccucaggaacgccgaaagcaacgcagauuacagcgggcuugaugucgauaggcuagucgua

SEQ ID NO: 357 - RNA, 143 nt, Phyllotreta nemorum
acgcaguacaagaaauccaaagaacgucacgcuucgcaggguagaaggcguuaugacaggaaacagcaggguuucgguggucaaacuaaacccauuuucaggaagaaggcaaaaaccaccaagaaaaucguguugaggaugga

SEQ ID NO: 358 - RNA, 747 nt, Phyllotreta striolata
ccgagaugguauccguuuuacguggaacguguggccuuccaguaggaucgaggccacccgcuuggugguaccauuagccugucuguaucagccucucaaagaaagaguagaucuuccucccauucaauaugauccuguauugugcacaagaaacaacugcagggcuauuuuaaauccacugugucaagucgacuaucgagcuaaauuauggguuugcaacuucugcuuccaaagaaauccauuuccucaacaauaugcagcuaucuccgaacaacaucaaccugcugaauuaaugccuauguucucgacucucgaguacacgauuaacagaguucaaugucugccucccauauucuuguauguuguggauacuugcauggaugaggaagaauuggguucgcuaaaggacuccuugcaaaugucguugaguuuguuaccucaaaacgcuuugauuggccugauuacauuuggaaaaaugguucaaguucacgaauuaggcaccgaaggugucagcaaaucuuacguguuccgaggcacuaaagaucuuacggcuaaacagguucaggaaauguuggguaucgguaaagucgcaaugacucaacaacaacaaccucaacaaccggggcaaccuaugagaccuggacaaccucaaucugcaccugucccgccugguagcagauuccugcaaccuauuucuaaaugugauaugaaucuaacagauuuaauuggagaacaacagaaagaucc

SEQ ID NO: 359 - RNA, 620 nt, Phyllotreta striolata
cgggauccaccaucagaauauucaagaacuucaaggagaagaagaauuucaaaucggacuuuggagccgaaggcaucuacggugguuaucuguugggcgugaagucuguauccggauuggcguucuacgauugggaaacucuggauuugguuaggaggaucgaaauacaaccucgcucgauauacuggucugauagcgguaaacugguuuguuuggccaccgaggacaguuauuucauccuaucuuacgaugucgaagaaguucaaaaagcaagggauaacaaccagguggcugaugauggaguggaauccgcguucaaucuccuaggggaagugaacgaguccguucgaacgggucuuuggguaggagauugcuucauuuacacgaacgcuguaaaccgcaucaacuacuucgucggaggugaauuggugaccaucgcgcaucuggaugggccguuguacgugcugggcuacguucccaaagacgauagacucuauuuagucgacaaagaauugagaguggucagcuaucaguugcuccuuucggucuuggaguaccaaacagccguaaugagaagagauuucucgacggccgacagaguguugccuucgauucccaag

SEQ ID NO: 360 - RNA, 747 nt, Phyllotreta striolata
acuuaccuagauggcgaacaagacaugucuuguaaaaggaacgcuuuucuuaugcucuugcacgccgaucaagaucgagcccucacuuaucuauccaauuguuuagaucaagucgcuuccuucggggauauccuucaguugguuaucgucgaauugauauacaaggugugccacucuaaccccaccgagagauccagauucauucgaugcauauacaaucuguuaaauucgagcaguccugcuguuagauacgaagcggcagguacucucauuacuuuguccagcgcuccgacugcuauaaaagccgccgccaguuguuacaucgaauugaucauuaaagagagcgacaacaacgucaaauugaucguuuuggauagauugaucgcguugaaggaacauccgagccacgagagaguccuacaggacuugguuauggauauauugagaguguuaucggcucccgauuuggaggugcgaaagaaaacgcuuaauuuagcgcucgaauugguguccucucguaacgucgaagaaaugguguuugugcugaagaaggaggugucgaagaccauggauagcgaacacgaagauaccgggaaauacaggcaacuguuggucagaacguugcauucuuguugcaucaaauuccccgauauagcugcuacggucauucccguucuaauggaguuccuguccgauagcaacgaauuggcggccaccgauguguugcuauuucugagggaagccaua

SEQ ID NO: 361 - RNA, 741 nt, Phyllotreta striolata
caacuggaagauggucgcacucuuucugauuacaacauccagaaagaaucuacucuucacuugguuuugagacuucgugguggaaugcagaucuuuguaaaaacuuuaacuggaaagaccaucaccuuggaagucgagccauccgacaccauugagaauguaaaagcuaaaauccaggacaaggaagguaucccaccagaccagcagagauugaucuucgcaggaaaacaacuagaagauggucguacucuuucugauuacaacauccaaaaggaaucuacucuucacuugguacuuagacuucgugguggaaugcaaaucuucguuaaaacucuuacuggaaagaccaucacucuugaaguugaaccuucugacacuauugagaaugucaaagccaagauccaggacaaggagggaauucccccagaccaacaacguuugaucuucgccgguaaacaauuagaagauggccguacucuuucugauuacaacauccaaaaggaaucuacucuccacuugguacuuagacuucguggaggaaugcaaaucuucguuaaaacuuuaacuggaaaaacuaucaccuuggaagucgagccauccgacaccauugagaaugucaaagcuaaaauccaggacaaggaagguaucccaccagaccaacaacguuugaucuucgcuggaaaacaacuagaagauggucguacucuuucugacuacaacauccagaaggaaucuacucuu

SEQ ID NO: 362 - RNA, 553 nt, Phyllotreta striolata
aauucgacgauuucguuuuaguugcugccgauaugacugcggcccaaagcauaauuguuaugaaaacagacgaaaauaagcuguucaaauuguccaacaagcuuguuauggcuguauccggcgagucuggugauacuacccaauuugcggaguacaucgccaagaauauucaguuguauaaaaugagaaacaccuacgaacuuagcccaucagaggcggcuucguucacucguaggaaucucgccgaugcccuuagaagcagaaguccuuaucacguaaauuugcuacuggcuggauacgacgagaaagaaggcccucaauuauacuacauggacuacuuggcgucgaccaucaaaguuaauuacgcugcucacgguuacggaggcuucuucucguugucuaucauggauagaaacuacagcaaaucucuaagcagagaagaagguuacgaguugcuaaaaaaaugcgugaaagaaguucagaaaagauuaaucaucaauuuaccuaacuuuaagguacagugcgucggcaaagaugguaucacagauuugcc

SEQ ID NO: 363 - RNA, 410 nt, Phyllotreta striolata
cgaagaaggccaagaaagguuucaugacccccgaaagaaagaagaaacuuagguuacuguugagaaagaaagccgccgaggaacugaagaaggagcaggaaaggaaagcggccgaaaggagacgcaucaucgaagagcgcugcggaaagcccaaacugaucgaugacgccaaugaaggccaacuuaagaagauuugcaaagacuauuaugaccgcauguauauaugugaggagcagaaaugggauuuggaacgcgaaguucgaaaacgggacugggagaucucggaauugaacagucaagugaacgaccucagaggaaaauucgugaaaccgacguugaagaagguguccaaauacgaaaacaaauucgccaaguugcagaagaaggccgccgaauuuaacuuccgcaac

SEQ ID NO: 364 - RNA, 700 nt, Phyllotreta striolata
agccuggaaaaccuagaaauuaugauuuaggaaauggcguuaugagguuuucaagaaccaagauguuccacaagaaggcuuuauauaaauuuauugguaaaaaaguuaaggcuaccaagaaaccacagaagccucacguuaucgaaaagccaauuaacggagaaaagaacggaggaaagagauucgucuuagucaagaaacguagggcuuacuauccuacucaagacaagauuaagccgaggccugcgaagaaauccuucugccagcacaaacguucgcucagaacuaccauaacacccgguacuguucuaauuuuguuggccgguucccacaaggguaagagggucguuuuccuuaaacaacuguacucuggccuucuacucguaacuggaccguuuuccauuaaugccuguccguugagacguguuagccaacgauacguuaucgcuacaucuaccaaaaucgauguuagcgguauuaaaguucccgacaccuuuaacgacgacuauuucgcgaggaaacgcgucaagagggcgaagaaggaagaaggugacauuuuccaaaccaagaaagagguuuacaaaguaagugaggaaaggaaaaaggaccagacggaaaucgacacgcaggugauggcugcgaucaaaaaacacccugaccguaaaguucuccaagcuuauuuaucagcuaugugggguuu

SEQ ID NO: 365 - RNA, 589 nt, Phyllotreta striolata
guaaacaccgauuuuaugccacaagaugguucgaaugauuggagggacgcugcucacaguacaggaacuuccauuauggcaucugaauucgacggugggguugucauuggagccgauucacguacaaccacaggggcuuacaucgcaaacaggguguccgauaaacuaacgagaguaaccgaucacauuuacugcugccgguccgguucagcugcugauacagaggccaucgccgacaucguaggcuaccauuugaacuuccacgggauggaacugggcgaagagccgagcguggaagugggagcggccauauucaaggagcuguguuacaacuacagggacuccuugauggccgggauacucguggccggcugggauaagaagaaagggggccagauauauucgauaccgaucggggggaugugcgugagacaggaggugucuaucgguggguccgguucgagcuacguguacgguuacauggacgccaauuacaagccgaaaaugucuaaagaggauugcguuaaauucguaacuaauacuuuggcucuugcgaugucuagagaugguucaucuggugguguaauca

SEQ ID NO: 366 - RNA, 319 nt, Phyllotreta striolata
ugauacucuucgccaacgucuugcaaugggcccucgccggcgcaaucuuugcccuuugccuuuggcugagguucgaggagggcauccaagaauggcugcagaaauuggauuccgaacaauuuuacaacggaguuuauguacuuauagucgcuucgcugaucgucaugauuguguccuuucugggauguauuagugcccugcaggagaauacggugacccuuuuggccuacaucggcacgcaagugcugagcuucauauucgguuuagccgggccggcuguucuucuggauaacagcgccagagauucccacuuccagcc

SEQ ID NO: 367 - RNA, 775 nt, Phyllotreta striolata
aucacgcaagccgacgauauuaucagcaugcucaccuacgcuuuccaaguggcgaugagccugauccagaaucgagcguuucgcaacaccguguugagaucguuaguaggccuguaucgcggcuugacuaccccggacuacgucaacaugugccaaugucugaucuuuuuggaugaugcgcuagcgguggcggaaauuuuagauaaauuaguguccggcaaggaagaguccgaauugauggcuuaccaaauagcauucgaucucuacgaguccgcaacgcaacaguuucuggagagaguuuuggucgcgcuuagagcuacagcucccauaccuucgcuguuagaggaaaagguuaaaucuaaaaccgccgaaacaucuagcagcacuucagcagagucuggcagcaaagauccugucgucggugaaacuaaaagcgaggcgaaagaagaaaaaucuaucgaggguuugacugaaagugaaaaggaacaccaaaaacgaaucgaaaaauugcacaccaucuuauccggcgaaguaucuauagaacuccaucuucaguuucucauuagauccaaccacgccgaucuucuuauucugaagcaaacgaaagaaacgguucgaguugguauuugccacacugcuacagugauugcuaacgcuuucaugcacagcgguacuaccagugaccaauuuuuaagggauaauuuggaauggcuagccagagcgacgaauugggcgaaacuuacagccacagccucccugggugucauccaucgug

SEQ ID NO: 368 - RNA, 302 nt, Phyllotreta striolata
aaaauccaggauaaggaaggaauucccccagaccagcagcgauugaucuucgccgguaaacaacuggaagacggccguacccuuucagauuacaacauccaaaaggagucuacccuccacuuggugcugcguuugagaggaggaaucaucgagcccucucugcgucuguuggcccaaaaguacaauugcgacaagaugauuugccgcaaaugcuacgccagguuacauccgagagccaccaauugcaggaaaaccaaguguggacacaccaacaacuugcgccccaagaagaagcugaagua

SEQ ID NO: 369 - RNA, 655 nt, Phyllotreta striolata
cgaacacguuucuuuagcuguuagaauacugcaucugcuugguagagaaggaccgaaaaccaaacaaccuuccagauacauccguuucauuuacaaccgcgucaucuuagagugcccuuccauaagagcagccgcugucucugccauggcccaauucggagcuucgugucccgauuuguuagaaaauauucaaguauuacuagccagaugccaaauggacucugacgaugaagucagagacagagcuacuuauuacagcagcauacuuagcaaaaacgauaaaaacuuguacaacaacuuuauccuugauacguuacagguaucuauaccgggguuagaacgcucguugaaggaguacacgcagaacucuacgaaucaaccguucgauauaaaaucagugccgcugcaagugggcccgucuccggacgagcgcgagaagaagcacaaauccgaaggcaugcugucgucgcaggggccccugcgaccgccgcccgucucgcgcgaggagaacuucgcggagaaacugucggccauaccgggcauccagcagcucgguccgaucuucaagagcuccgacgugguggagcugaccgaauccgagacggaguacuucgugcggugcaucaagcacugcuucgcccaucacgugguguug

SEQ ID NO: 370 - RNA, 720 nt, Phyllotreta striolata
ucgaggcuguuguacuaccuaugacucauaaagacaaguucguuaacuugggaauucauccucccaaagguguucuccuuuacggucccccggguaccgguaaaacccuccuagccagagccugcgccgcccaaaccaaaucaacuuuccucaaacuggccgguccucaguuaguccagauguucauaggcgacggcgccaaguuaguccgagacgccuucgccuuggccaaagagaaggcacccgcuauaauauucaucgacgagcuggacgccaucgguacgaagcgauucgacucggagaaagccggagaccgggagguccaacgaaccauguuggaacugcucaaccaacuggacggcuucagcucgacauccgacaucaaagucauagcggcuacgaaucgcguggauauucuggaucccgcccugcugcgguccggaagguuggaccggaagaucgaguucccgcaucccaacgaagaggcgcgagcgagaaucaugcagauucacuccagaaaaaugacgguuaacccggacgugaacuucgaggaauuggccaggucuacugaugacuucaauggggcccaguguaaggcugugugugucgaagcuggaaugaucgcucucagacguaacgccacugcugugacucacgaggacuacauggaugcuauuauggaaguucaagcuaagaaaaaggcgaaucugaauuauuacg

SEQ ID NO: 371 - RNA, 560 nt, Phyllotreta striolata
aaaagaaaaggauacgggucccacgcccggagaagcuauccaaaagcucagggaaaccgaggacauguuauauaaaaaacaagaguuuuuagaaaagaaaauagaggaauacacauuaauagccaaaaagaaugcaucaaagaacaagagaguugcuuugcaagcgcucaaaaagaaaaaacgcuuggaaaaaacccaauuacaaaucgauggaacacucacuaccauugaaaugcaaagggaagcccucgaaggagccaguaccaacacagccgucuuagauuccaugaagaaugcugcugaagcccuacagaaagcccacaaaaacuugaauguugaugauguccaugauaucauggaugacauagcugaacagcacgauauugcuaaugagauuacuacugcuauuagccagccgguuggcuucaaugaugaucuggaugaggaugaauuagaaagugaacuagaaaagcuugaacaagaaggauuagaggaagauuugcugaaagugccugguccuacugaauuaccugcuguaccuacaggagcuaucgcuaagc

SEQ ID NO: 372 - RNA, 562 nt, Phyllotreta striolata
auucaagcugcuucuuaucggcgauucuggaguaggaaaaucguguuugcuauugagauuugcggaugauacuuacacggagaguuauauuaguacuauuggaguagauuuuaaaaucagaacaaucgacuuagauggaaaaacaauuaaauugcaaauuugggauaccgccggacaggaaagauuuagaacuauaacaucgaguuacuacaggggcgcgcacggaaucaucgucguguacgauugcacagaucaggacucguucaacaacgugaaacaaugguuggaggaaaucgaccguuacgcaugcgacaacgucaauaaauuacuuguaggaaauaaaagugaucuuacgacuaagaaaguugucgauuucaauacggccaaggaauacgcggaucaguugggcguaccguuuuuggagacgucggcgaagaacgccaccaacguagagcaggccuuuaugacgauggcggcggaaauuaaaaaucgauuagggccgccgaccgcggccgcggaucaaggaaacaaaguuagauucgaucaaagucguccuguugaa

SEQ ID NO: 373 - RNA, 587 nt, Phyllotreta striolata
aguucaaauugguguugcucggcgagagcgccgucgguaaauccagucuggugcugagguucgucaagggccaguuccacgaguaccaggagagcaccaucggggccgccuuucucacccaaacuaucugcuuggacgacaccaccguuaaauucgaaauaugggacaccgcgggacaagaaagguaucacaguuuagcuccgauguacuacagaggggcgcaggcagcuauagugguguacgacauaaccaaucaagauacguucggcagagcgaaaacgugggugaaggaacuccagaggcaggccaguccgacgaucgugauagcccuagccggcaacaagcaggauuuggcuaacaagcggaugguggaguacgaggaggcccaaaccuacgccgaugagaacgguuugcuuuucauggaaacaucggcgaaaacggcgaugaacguuaacgauauauuuuuagcaauagcuaagaaacugcccaaaaacgaacaaacauccggucaggggggcagcgcccaaggcaggcgauuggcagaaggagaugcgggcgccaaggccccgggaaacugcugcaaguga

SEQ ID NO: 374 - RNA, 449 nt, Phyllotreta striolata
guagguuuagaugcugcugguaaaaccacaauuuuauauaaacuaaaauuaggagaaauuguaacaaccaucccaacuauugguuuuaaugucgagacuguagaauauaagaauaucagcuuuacugugugggaugucgguggucaggauaaaauuaggccauuguggagacacuauuuucaaaauacgcagggccuaaucuucguagucgacagcaacgacagggagcguaucaccgaggccaaagacgagcugaugcgcaugcuggccgaagacgagcuccgggacgccguucuuuugauauucgccaacaagcaggauuugccgaacgccaugaacgccgccgaaaucaccgauaagcucggauuacauucguugcgcaaccguaacugguacauacaggccacgugcgccaccagcggagacggucucuacgaaggucucgauug

SEQ ID NO: 375 - RNA, 735 nt, Phyllotreta striolata
uucaccgaacuggcuauauuguauucgaaauauaaaccggcuaggaugcgcgaacaucucgaauuguucuggucgcgcguuaauauucccaaagugcuuagagccgccgaacaggcgcaucugugggccgaauugguguuucuguucgacaaauacgaagaguacgacaacgccgucuuggcgaugaugaugcauccgacggaggcguggcgcgagggccauuucaaagacaucaucacgaaaguggcgaacaucgaauuguacuacaaggcgauucaauucuaucucgauuucaagccgcuguuguugaacgaucuucuguuggugcuggcuccgagaauggaucacacuagagccguggcuuucuucaguaaaaccggccacuuacagcugguuaaaucuuacuuacgaucuguccaaaauuugaacaauaaagcgaucaacgaggcucucaauucucugcuuauagaggaagaagacuuccaggggcucagaacauccauagacgcguucgauaacuucgauaacauagguuuagcgcagagauuagaaaagcacgaauuaaccgaauuuagacgcaucgccgcuuaccuauacaaaggcaacaaccgguggaaacagagcguggaauugugcaaaaaagacaggcuguuuagagacgccauggaauacacgucggaaucgagaaaccaagaauuggccgaggaacugcucgcuugguucuuggacagaaag

SEQ ID NO: 376 - RNA, 773 nt, Phyllotreta striolata
aaaacgaagucaccaagaaaguccaaacgcccacuugcgaugaaguuuuuuacgcaggcacgggcaugcuguuguugagagacuccgaacacguuacguuguucgauguccagcaaaagaggacuuuggcucaaguuaaaaucagcaaaugcagauacgucguuuggucaucugauaugucgcaucuggcccuuuuaucuaagcauaacgugacgauuugcaauagaaaauuggauguuuugugcucguugcacgagaauaccagaguuaagucgggugcuugggaugacagcggaguguuuauuuacacuacuaguaaucauauuaaauauacauugaaaaauggugaucacggaauuauuagaacgcucgaucuucccauuuacauaacuagaguaaaagguagccagguguucuguuuggacagggaauguaagccucgcuuauuaguaaucgaucccaccgaauacaaauuuaaacucgcguugaucaaucacaaguacgaggaaguuuuguacauggucagaaacucucgauugguaggccaaaguauuauauccuacuugcaacaaaaaggauauccggaaguagcuuugcauuuugugaaagaugauaaaacuagauuugcucuggcuuuggaaugcggaaacaucgaaaucgcauuagaggccgcuaaagcucuaaacgauaaaaauuguugggaucaauuggcgcaagccgccuuguggcaaggcaaccaccaaaucguagaaaugugcuaucaacguacgaag

SEQ ID NO: 377 - RNA, 466 nt, Phyllotreta striolata
aaccucagaguccacuucaagaauacgugcgagaccgcgaacgccauaaggaagaugccccucaagcgggcaguggccuauuugaagaacguagucguccaaaaagaguguauuccauucaggagguucaacggaggaguaggccguugugcccaagccaagcaauucggcaccacacagggaagguggcccaagaagucagccgaauuccuguuacagcuccucaggaacgccgagagcaacgcagauuacagcgggcuugaugucgauaggcuagucguagaacacauucaaguuaaccgagcugcuuguuugagacgucguacguacagggcucacgguaggaucaauccguacaugucaucgcccugucacaucgaacucugguuaaccgagggagaaucgucaccugaggcuccuaagaagagcaacaaaaagaaggcaacggagaagaagagacccaagu

SEQ ID NO: 378 - RNA, 216 nt, Phyllotreta striolata
gcaguacaagaaauccaaggaacgucacgcugcgcaggguagaaggcguuaugacagaaaacagcaggguuucgguggucaaacuaaaccuauuuucaggaagaaggcaaaaaccaccaagaaaaucguguugaggauggagugugcagauugcaaguacagaaagcaguucccuuugaagagaugcaagcacuucgaacuuggaggugacaagaa

SEQ ID NO: 379 - protein, 772 aa, Psylliodes chrysocephala
MSTYEEYIQQNEDRDGIRFTWNVWPSSRIEATRLVVPLACLYQPIKERLDLPPIQYDPVLCTRNNCRAILNPMCQVDYRAKLWVCNFCFQRNPFPPQYAAISEQHQPAELMPMFSTIEYTITRAQCLPPIFLYVVDTCMDEEELGSLKDSLQMSLSLLPPNALIGLITFGKMAQVHELGTEGCSKSYVFRGTKDLTAKQVQEMLGIGKVAMGPQQQPGQPRPGQMQPAPIAPGSRFLQPVSKCDMNLTDLIGEQQKDPWPVHQGKRSLRCTGVALSIAIGLLESTYPNTGARVMLFVGGPCSQGPGQVLNDDLKQPIRSHHDIQKDNAKYMKKGIKHYDALAMRAATNGHCVDIYSCALDQTGLMEMKQCCNSTGGHMVMGDSFNSSLFKQTFQRVFTKDQKGELKMAFNGTLEVKCSRELKVQGGIGSCVSLNVKGPLVSDTEIGMGNTVQWKMCTLTPSTTIALFFEVVNQHSAPIPQGGRGCIQFITQYQHSNGQRRIRVSTIARNWADATANIHHISAGFDQEAAAVIMARMAVYRAESDDSPDVLRWVDRMLIRLCQKFGEYNKDDANSFRLGQNFSLYPQFMYHLRRSQFLQVFNNSPDETSYYRHMLMREDLTQSLIMIQPILYSYSFNGPPEPVLLDTSSIQSERILLMDTFFQILIFHGETIAQWRNLKYQDMPEYENFRQLLQAPVDDAQEILQTRFPMPRYIDTEQGGSQARFLLSKVNPSQTHNNMYAYGGDAGAPVLTDDVSLQVFMDHLKKLAVSSTA

SEQ ID NO: 380 - protein, 906 aa, Psylliodes chrysocephala
MPLRLDIKRRLTARSDRVKCVDLHPTEPWMLCSLYSGNINVWNHENQQLVKTFEVCDLPVRAAKFVPRKNWIVSGSDDMQIRVFNYNTLDRVHAFEAHSDYVRSIVVHPTQPYILTSSDDMLIKLWNWEKAWACQQVFEGHIHYIMQISINPKDNNTFASASLDRTIKVWQLGASTANFTLEGHEKGVNCVDYYHGGDKPYLISGADDRLVKIWDYQNKTCVQTLEGHGQNVTAVCFHPELPIALTGSEDGTIRVWHANTHRLESSLNYGFERVWTIFCLKGSNNVALGYDEGSILVKVGREEPAVSMDASGGKIIWARHSELQQANLKALPEGAEIRDGERLPVSVKDMGACDIYPQTIQHNPNGRFVVVCGDGEYIIYTAMALRNKAFGSAQEFVWAQDSSEYAIRESGSTIRIFKNFKEKKNFKSDFGAEGIFGGYLLGVKSVSGLTFYDWETLDLVRRIEIQPRAIYWSDSGKLVCLATEDSYFILSYDSDEVQRAKDNNQVADDGVESAFNLLGEINESVRTGLWVGDCFIYTNSVNRINYFVGGELVTIAHLDGPLYVLGYVPKDDRLYLVDKELRVVSYQLLLSVLEYQTAVMRRDFSTADRVLPSIPKEHRTRVAHFLEKQGFKQQALAVSSDPEHRFELAVALEDLNTARALAQEANNPQKWSQLAELAASTNNLELAKECMQKAQDYGGLLLLATSSGDEKVVRALGDATQTEGKHNLSFLSHFLVGDLNKCLNILITTGRLPEAAFFARSYLPDKISEVVDLWRTQLSTINQKAGQSLADPKDYENLFPGLQEAIVAQKFLEQNNPGFTPAMLATSITPNHERNVIAEVEAQSKNSGVTGSSSQYSVKAPIEQLKKLSIDQDDDDDDIDLDLDGVNIDENIDTTDINIDDDLLSD

SEQ ID NO: 381 - protein, 955 aa, Psylliodes chrysocephala
MTAVEQSCYTLINLPTDSEPYNEMQLKMDLEKGEVKVKIRALERIIHMILAGERLPNGFLMTIIRNVLPLQDHLAKKLLLIFWEIVPKTSPDGKLLQEMILVCDAYRKDLQHPNEFLRGSTLRFLCKLKEPELLEPLMASIRACLDHRHSYVRRNAVLAIFTIYRNFEFLIPDAPELISTYLDGEQDMSCKRNAFLMLLHADQDRALSYLANCLDQVTSFGDILQLVIVELIYKVCHSNPTERSRFIRCIYNLLNSSSPAVRYEAAGTLVTLSSAPTAVKAAASCYIELIIKESDNNVKLIVLDRLIALKEHPSHERVLQDLVMDILRVLQAPDLEVRKKTLNLALELVSSRNIEEMVLVLKKEVSKTVDSEHEDTGKYRQLLVRTLHSCCIKFPDVAVTVIPVLMEFLSDSNELAATDVLLFLREAIQKFDNLQPLIIEKLLETFKDIKSVKVHRAALWILGEYATSVSDIEAVIKEINQTLGEAPLLETEQKLISGETDDTTTVPTGGATTLVTSDGTYATQSAFNSVSKSSKEKRPPLRQYLMDGDFFIGASLTSTLTKLALRYGQIASAADRNRFDAEVMLIMAGIIHLGKSGLPTKPITNDDKDHILFCLRVISDRTDPIIQIFSTLCRSALNDMLIAKEAEEATTQKSKEQSRHTIQTDDAISFLQLEADKSGELGENVFEMSLSQALVGGRGGQTDSLISSNKLNKITQLTGFSDPVYSEAYVHVNQYDIVLDVLIVNQTNDTLQNCTLELATLGDLKLVEKPQPVVLAPKDFCNIKANVKVASTENGIIFGNIVYDVTGAASDRNVVVLNDIHIDIMDYIVPASCTDTEFMRMWAEFEWENKVTVNTPLTDLADYLDHLLKSTNMKCLTSEKALSGQCGFMAANMYAKSIFGEDALANLSIEKPFNKPDAPVAGHIRIRAKSQGMALSLGDKINMTQKGTQSKVAAA

SEQ ID NO: 382 - protein, 205 aa, Psylliodes chrysocephala
MHLVLRLRGGMQIFVKTLTGKTITLEVEASDTIENVKAKIQDKEGIPPDQQRLIFAGKQLEDGRTLSDYNIQKESTLHLVLRLRGGMQIFVKTLTGKTITLEVEPSDSIENVKAKIQDKEGIPPDQQRLIFAGKQLEDGRTLSDYNIQKESTLHLVLRLRGGMQIFVKTLTGKTITLEVEASDTIENVKAKIQDKEGIPPDQQRL

SEQ ID NO: 383 - protein, 200 aa, Psylliodes chrysocephala
MECLLGIKFNDFVLIAADMTAAQSVIVMKTDENKLFKLSNKLVMAVSGESGDTTQFAEYIAKNIQLYKMRNTYELSPAEAAAFTRRNLADTLRSRSPYHVNLLLAGYDAKDGPQLYYMDYLASIAKVDYAAHGYGGFFSLSIMDRNYLKNLSKQQGYELLKKCVKEVQKRLIINLPNFKVQCIDKDGIQDMPNITPKDLE

SEQ ID NO: 384 - protein, 185 aa, Psylliodes chrysocephala
MADDEEKKRKQAEIERKRAEVRARMEEASKAKKAKKGFMTPERKKKLRLLLRKKAAEELKKEQERKAAERRRIIEERCGKPKLIDDASEAKLKTVCKTYHERIDKLEDKKFDLENEVEFKDFQISELNSQVNDLRGKFVKPTLKKVSKYENKFAKLQKKAAEFNFRNQLKVVKKKEFTLEEEDKE

SEQ ID NO: 385 - protein, 256 aa, Psylliodes chrysocephala
MAPTEKQPAKGKKVGKPRNYDLGNGIVRFSRTKMFHKKALYKFIGKKVAAEKKPIKPRVIEKQIGGEKNGGKRYVLVEKRRAVYPTQDRIKKRPAKQLFKDHARTLRASISPGTVLILLAGSHKGKRVVFLKQLKSGLLLVTGPFGINACPLRRISQRYVIGTQTKIDVSGVKLPENINDEYFKRQRQKRAKKEEGDIFQTKKQGYKVSDQRKTDQKEVDTQVLAAIRKHPDRKVLLAYLSAMFGLRSSQFPHRLQ

SEQ ID NO: 386 - protein, 225 aa, Psylliodes chrysocephala
MSSGFTNFAAQNGPDDWRDAAHSTGTSIMAAEFDGGVVIGADSRTTTGAYIANRVADKLTKITDHIYCCRSGSAADTQAIADIVAYHLNFHGMELGEEPLVEVGAAIFKELCYNYRDSLMAGILVAGWDKKKGGQVYSIPIGGMCVRQEVSIGGSGSSYVYGYVDANFKPGMSKEDCVKFVSNTLALAMSRDGSSGGVVRIGIITEKGIERRVILGNELPKFYEG

SEQ ID NO: 387 - protein, 248 aa, Psylliodes chrysocephala
MAGKGDGEGEGNILKLENQIAVIKYVILFTNVLLWALGGAIFGLCLWLRFEEGIQEWLQKLDSEQFYIGVYVLIVASVIVMIVSFLGCISALQESSFALLLYIGSQVLSFIFGLSGSAVLLDNSARDSHFQPRIRESMRRLIMNAHHEASKETLAMIQENIGCCGADGASDYLSLQQPLPTQCRDTVTGNPYYHGCVNELTWFFEEKCGWIAGLAMTICFIAVLNVVLSTVLIQALKKEEEQADSYRK

SEQ ID NO: 388 - protein, 946 aa, Psylliodes chrysocephala
MNITSAAGIISLLEEPRPELKVFALKKLDSIVDEFWPEISEAIEKIEILHEDKVFQQHQLAALVASKVYYHLGAFEDSLTYALGAGDLFDVNARTEYVETTLAKCIDYYTQHRIALAEGVRDAKPIDARLEAIVNRMFQRCLDDGQNRQAMGLALETRRMDIFELSITQADDIIGMLTYAFQVAMSLIQNRAFRNTVLRSLVGLYRGLTTPDYVNMCQCLIFLDDPLPVAEILDKLVSGKEDTELMAYQIAFDLYESATQQFLERVLVALRATAPIPSLLEEKAKPKIGDQASSTSAEASTGDATVSESKTEVVKEEKSIDSLSDHEKEHQKRIEKLHTILSGEVSIELHLQFLIRSNHADLLILKQTKETVRVSICHTATVIANAFMHSGTTSDQFLRDNLEWLARATNWAKLTATASLGVIHRGHEQEALTLMQSYLPKEVGPSSGYSEGGGLYALGLIHANHGANIIDYLLGQLKDAQNEMVRHGGCLGLGLAAMGTHRHDVYEQLKFNLYQDDANTGEAAGIAMGMVMLGSNNSATIMDMVAYAQESQHEKILRGLAVGISFTMYGRLEEADSLIHQLTSDKDPILRRSGMYTLAMAYCGTGHNQAIRKLLHVAVSDVNDDVRRAAVTALGFLLFRTPEQCPSVVSLLAESYNPHVRYGAAMALGIACAGTGLREAIALLEPMVMFDPVNFVRQGALIASAMILIQQTEQTCPKVSFFRQTYASVISNKHEDVMAKFGAILAQGIIDAGGRNVTLSLQSRTGHTNMLAVVGTLVFTQYWYWFPLSHCLALAFTPTCVIALNTQLKMPKLEFKSNAKPSLYAYPAPMEEKKREEREKVTTAVLSIAARQRRRDHERKHRDEKMDVDEEKDDKKTEKEEKKPEEKKEDKKPEEKKADDKKPSTSTADDKKEKKDEKEEKKKEPEPNFEILQNPARTMRQQLKVI

SEQ ID NO: 389 - protein, 128 aa, Psylliodes chrysocephala
MQIFVKTLTGKTITLEVEPSDTIENVKAKIQDKEGIPPDQQRLIFAGKQLEDGRTLSDYNIQKESTLHLVLRLRGGIIEPSLRLLAQKYNCDKMICRKCYARLHPRATNCRKTKCGHTNNLRPKKKLK

SEQ ID NO: 390 - protein, 879 aa, Psylliodes chrysocephala
MSSFKRDKKEEEDGGINLFQNIEKTTVLQEARVFNETSVNPRKCTPILTKLLYLLNQGESLSVKEATDVFFAMTKLFQSKDVILRRMVYLGIKELSSTADDVIIVTSSLTKDMTGKEDIYRAAAIRALCSITDATMLQAIERYMKQAIVDRNSAVSSAALVSSLHMTRMAPEVVKRWVNEAQEAINSDNVMVQYHALGLLYHIRKTDRLAVTKLIARLTRMSLKSPYAACMLIRITAKLLEEEDSGNDTPYFEFIESCLRHKSEMVVYEAAHAIVNLKRTTSRELAPAVSVLQLFCGSPKPTLRFAAVRTLNQVAISHPAAVTACNLDLENLITDSNRSIATLAITTLLKTGAESSVDRLMKQIASFVSEISDEFKVVVVQAIKALALKFPRKHSTLMNFLSAMLRDEGGLEYKASIADTIITIIEDNPEAKESGLAHLCEFIEDCEHVSLAVRILHLLGREGPKTKQPSRYIRFIYNRVILECPSIRAAAVSAMAQFGASCPDLLENIQVLLARCQMDSDDEVRDRATYYSNILSRSDKNLYNNYIIDTLQVSIPSLERSLKEYTQNQTIQPFDIKSVPLAAVPTSEEREKKHKTEGMLISQGPVRPPPVSREENFAEKLAAIPGIQQLGPLFRSSEVVELTESETEYFVRCIKHCFAHHIVLQFDCLNTLADQLLENVRVDLDPNENFEILAEIPCEQLHYNQTGTTYVILKFPDDDLTSCVGTFGAVLKFVVKDCDPTTGIPDCEDGYEEEYMLEDLEVTLGDQIQRVGKVNWAAAWDKAAEGSVEKEDTYSLSSMNTLDEAVKNIIQFLGLAAAERTDQVPEGKSTHTLLLSGVFRGGIEILVRAKLALADGVTMQLTVRSPDDSVAELITSSVG

SEQ ID NO: 391 - protein, 427 aa, Psylliodes chrysocephala
MSTLEDKSIWEDGEEALGEEVLRMSTDEIVSRTRLLDNEIKIMKSEVMRINHELQAQNEKIKENTEKIKVNKTLPYLVSNVIELLDVDPQEEEEDGAVVDLDSQRKGKCAVVKTSTRQTYFLPVIGLVDEEKLKPGDLVGVNKDSYLILETLPAEYDARVKAMEVDERPAEQYSDIGGLDKQIQELIEAVVLPMTHKDKFVNLGIHPPKGVLLYGPPGTGKTLLARACAAQTKSTFLKLAGPQLVQMFIGDGAKLVRDAFALAKEKSPAIIFIDELDAIGTKRFDSEKAGDREVQRTMLELLNQLDGFSSTADIKVIAATNRVDILDPALLRSGRLDRKIEFPHPNEEARARIMQIHSRKMTVNPDVNFEELARSTDDFNGAQCKAVCVEAGMIALRRNANAVTHEDYMDAIMEVQAKKKANLNYYA

SEQ ID NO: 392 - protein, 221 aa, Psylliodes chrysocephala
MSFFNKIFGGKEKDEGPTPGEAIQKLRETEEMLYKKQEFLEKKIEEYTLLAKKNASKNKRVALQALKKKKRLEKTQLQIDGTLTTIEMQREALEGASTNTAVLDSMKNAADALKKAHKNLDVDNVHDIMDDIAEQHDIANEITNAISNPVGFSDDMDEDELEKELEELEQEGLEEDLLKVPGPTELPAVPAGAIAKPAVVKPAARKVEDDDDMKELEAWAS

SEQ ID NO: 393 - protein, 202 aa, Psylliodes chrysocephala
MNPEYDYLFKLLLIGDSGVGKSCLLLRFADDTYTESYISTIGVDFKIRTIDLDGKTIKLQIWDTAGQERFRTITSSYYRGAHGIIVVYDCTDQDSFNNVKQWLEEIDRYACDNVNKLLVGNKSDLTTKKVVDFNTAKEYADQLGIPFLETSAKNATNVEQAFMTMAAEIKNRVGPPSSAADQGNKVRFDQSRPVETTKSGCC

SEQ ID NO: 394 - protein, 216 aa, Psylliodes chrysocephala
MATNRTGTAQRPNGATQGKICQFKLVLLGESAVGKSSLVLRFVKGQFHEYQESTIGAAFLTQTICLDDTTVKFEIWDTAGQERYHSLAPMYYRGAQAAIVVYDITNQDTFGRAKTWVKELQRQASPTIVIALAGNKQDLANKRMVEYEEAQTYADENGLLFMETSAKTAMNVNDIFLAIAKKLPKNEQTTGQGGSAQGRRLAEGDAGAKTAGNCCK

SEQ ID NO: 395 - protein, 182 aa, Psylliodes chrysocephala
MGNVFANLFKGLFGKKEMRILMVGLDAAGKTTILYKLKLGEIVTTIPTIGFNVETVEYKNISFTVWDVGGQDKIRPLWRHYFQNTQGLIFVVDSNDRERITEAKDELMRMLAEDELRDAVLLIFANKQDLPNAMNAAEITDKLGLHSLRNRNWYIQATCATSGDGLYEGLDWLSNQLKNANR

SEQ ID NO: 396 - protein, 70 aa, Psylliodes chrysocephala
MNNNNNNNNNNNNNNNNNNNNNNNNNNNNNNNNNNNNNNNNNNNNNNNNNNNNNNNNNNNNNNNNNNNNN

SEQ ID NO: 397 - protein, 1115 aa, Psylliodes chrysocephala
MLTKFETKSARVKGLSFHPKRPWILASLHNGCIQLWDYRMCTLLEKFDEHDGPVRGICFHSQQPLFVSGGDDYKIKVWNYKQKRCIFTLLGHLDYIRTTMFHHEYPWIVSASDDQTIRIWNWQSRTCICVLTGHNHYVMCATFHPTDDLLVSASLDSTVRVWDISGLRKKNVAPGPAGLEEHLKNPGSTDLFGQADAVVKHVLEGHDRGVNWASFHPTLPLIASGADDRQIKLWRMNDSKAWEVDTCRGHYNNVSCVLFHPRQELLLSNGEDRSIRVWDMAKRTCLHTFRREHERFWVMTSHPNLNLFAAGHDGGMVIFKLERERPAYTVHGNLLYYVKERFLRKLDFTTSKDVPVMQIRGGGKIPVYRMSFNPAENAVLLSTRTSNLDNSTYDLYMIPKDQEREDHVPEAESKRSSGLTALWVARNRFAVLDRTHQLIIKNLKNEVTKKVQTPTCDEVFYAGTGMLLLRDSEHVTLFDVQQKRTLAQVKINKCRYVVWSSDMSHLALLSKHNVTVCNRKLDVLCSLHENTRVKSGAWDDSGVFIYTTSNHIKYTLKNGDHGIIRTLDLPIYITRVRGSQVFCLDRECKPRLLVIDPTEYKFKLALINHKYEEVLYMVRNSRLVGQSIISYLQQKGYPEVALHFVKDDKTRFTLALECGNIEIALEAAKALNDKNCWDQLAQAALWQGNHQVVEMCYQRTKSFEKLSFLYLITGNLEKLRKMMKIAEIRKARSSQYHAALLLGDLEERVKVLKASNQLSLAYLTAATHGMREEADQLKEQIGDTKKVPDVDPNAKFLNPPPPIQQAESNWPLLTVSRSFFENTAAVATASANMKSLMAEPISDVAMEEAQGWGDDDELELDPDEKKPDTAAAGGDGEAGWDVEDEGLEIPDLGPTATAEVEGNFVHLPTPGPSPPLTWTKNSQLVADHVAAGSFESAARLLHDQLGVVDFKPFESLFLNLYSTSKTVSSWQQNVPPSFSYPLRNWKEANIKNQLPASGVKLNDVVAKLQICYQLTTGGKFTEAIEKLQTLLLSVSLLVVDNKQEITEAQQLLRIASEYICGLQMETLRKTMPKTSPEEQKRQCEMAAYFTHCKLQPIHQILTLRTALNMFFKLKN

SEQ ID NO: 398 - protein, 184 aa, Psylliodes chrysocephala
MGRYAREPENAAKSCKARGSNLRVHFKNTCETANAIRKMPLKRAVSYLKNVVVQKECIPFRRFNGGVGRCAQAKQFGTTQGRWPKKSAEFLLQLLRNAESNADYSGLDVDRLVVEHIQVNRAACLRRRTYRAHGRINPYMSSPCHIELWLTEGESTPDLPKKTNKKKTAVDKKRPKASAAAVAH

SEQ ID NO: 399 - protein, 104 aa, Psylliodes chrysocephala
MVNVPKQRRTFCKKCKVHKTHKVTQYKKSKERHASQGRRRYDRKQQGFGGQTKPIFRKKAKTTKKIVLRMECTDCKFRKQIPLKRCKHFELGGDKKRKGQMIQF

SEQ ID NO: 400 - protein, 432 aa, Phyllotreta nemorum
MAMRAATNGHCIDIYSCALDQTGLMEMKQCANSTGGHMVMGDSFNSSLFKQTFQRVFTRDQKNDLKMAFNGTLEVKCSRELKVQGGIGSCVSLNVKSQLVSDTEIGMGNTVQWKMCTLTPSTTMALFFEVVNQHSAPIPQGGRGCIQFITQYQHSSGQRRIRVTTVARNWADATTNIHHISAGFDQEAAAVIMARMAVYRAESDESPDVLRWVDRMLIRLCQKFGEYNKDDAGSFRLGQNFSLYPQFMYHLRRSQFLQVFNNSPDETSFYRHMLMREDLTQSLIMIQPILYSYSFNGPPEPVLLDTSSIQPDRILLMDTFFQILIFHGETIAQWRNLKYQDMPEYENFRQLLQAPVDDAQEILQTRFPMPRYIDTEQGGSQARFLLSKVNPSQTHNNMYSYGGDAGAPVLTDDVSLQVFMDHLKKLAVSSTA

SEQ ID NO: 401 - protein, 286 aa, Phyllotreta nemorum
MKALPEGAEIRDGERLPVSIKDMGACDIYPQTIQHNPNGRFVVVCGDGEYIIYTAMALRNKAFGSAQEFVWAQDSSEYAIRESGSTIRIFKNFKEKKNFKSDFGAEGIYGGYLLGVKSVSGLAFYDWETLDLVRRIEIQPRSIYWSDSGKLVCLATEDSYFILSYDVEEVQKARDNNQVADDGVESAFNLLGEVNESVRTGLWVGDCFIYTNAVNRINYFVGGELVTIAHLDGPLYVLGYVPKDDRLYLVDKELRVVSYQLLLSVLEYQTAVMRRDFSTADRVLPS

SEQ ID NO: 402 - protein, 956 aa, Phyllotreta nemorum
MTAVEQPCYTLINLPTDSEPYNEMQLKMDLEKGEVKVKIRALERIIHMILAGERLPNGFLMTIIRNVLPLQDHLAKKLLLIFWEIVPKTTPDGKLLQEMILVCDAYRKDLQHPNEFLRGSTLRFLCKLKEPELLEPLMPSIRICLEHRHSYVRRNAVLAIFTIYKNFEFLIPDAPELISTYLDGEQDMSCKRNAFLMLLHADQDRALTYLSNCLDQVASFGDILQLVIVELIYKVCHSNPAERSRFIRCIYNLLNSSSPAVRYEAAGTLITLSSAPTAIKAAASCYIELIIKESDNNVKLIVLDRLIALKEHPSHERVLQDLVMDILRVLSAPDLEVRKKTLNLALELVSSRNVEEMVFVLKKEVSKTVDSEQEDTGKYRQLLVRTLHSCCIKFPDIAATVIPVLMEFLSDSNELAATDVLLFLREAIQKFDNLEPLIIEKLLETFKDIKSVKVHRAALWILGEYATSTGDIEAVIKEIVQTLGECPLLETEQKSISGNTDESAPVHAPAGATTLVTSDGTYATQSAFNVASKSTKEKRPPLRQYLMDGDFFIAASLASTLTKLALRYGENVSASDRNKFDAEVMLIMAGILHLGKSGLPVKPITNDDNDHILFCLRVLSDRTDPVIQVFSSLCRNALNDMLLAKETEEATDQKSREKSRAAVQTDDAITFVQLESDRSGELGENMFETSLSQALMGGKTAQSDSTIGSSKLNKIAQLTGFSDPVYSEAYVHVNQYDIVLDVLVVNQTSDTLQNCTLELATLGDLKLVEKPQPVVLAPKDFCNIKANVKVASTENGIIFGNIVYDVTGAASDRNVVVLNDIHIDIMDYIVPASCTDSEFMRMWAEFEWENKVTVNTPLTDLNEYLEHLLKSTNMKCLTSEKALGGQCGFMAANMYAKSIFGEDALANLSIEKPFNKPDAPVAGHIRIRAKSQGMALSLGDKINMTQKGTQSKVVAA

SEQ ID NO: 403 - protein, 175 aa, Phyllotreta nemorum
MEDGRTLSDYNIQKESTLHLVLRLRGGMQIFVKTLTGKTITLEVEPSDTIENVKAKIQDKEGIPPDQQRLIFAGKQLEDGRTLSDYNIQKESTLHLVLRLRGGMQIFVKTLTGKTITLEVEPSDTIENVKAKIQDKEGIPPDQQRLIFAGKQLEDGRTLSDYNIQKESTLHLVLR

SEQ ID NO: 404 - protein, 200 aa, Phyllotreta nemorum
MECLLGIKFDDFVLVAADMTAAQSIIVMKTDENKLFKLSNKLVMAVSGESGDTTQFAEYIAKNIQLYKMRNTYELSPSEAASFTRRNLADALRSRSPYHVNLLLAGYDEKEGPQLYYMDYLASTIKVNYAAHGYGGFFSLSIMDRNYSKSLSREEGYELLKKCVREVQKRLIINLPNFKVQCVGKDGITDLPDITAKDLA

SEQ ID NO: 405 - protein, 198 aa, Phyllotreta nemorum
MADDEEKKRKQAEIERKRAEVRARMEEASKAKKAKKGFMTPERKKKLRLLLRKKAAEELKKEQERKAAERRRIIEERCGKPKLIDDANEEQLKSISKMYHERICKLEDQKFDLEYLVKKKDMEIAELNSQVNDLRGKFVKPTLKKVSKYENKFAKLQKKAAEFNFRNQLKVVKKKEFTLEEEDKETKKADKAEWQTKK

SEQ ID NO: 406 - protein, 264 aa, Phyllotreta nemorum
MVDKKKAETAPAEAPKRVHKPGKPRNYDLGNGVMRFSRTRMFHKKALYKFIGKKVKATKKPQKPHVIEKPINGEKNGGKRFVLVKKRRAYYPTQDKIKPRPAKKSFCQHKRSLRTTITPGTVLILLAGSHKGKRVVFLKQLYSGLLLVTGPFSINACPLRRISQRYVIATSTKIDVSGIKVPDNFNDDYFARKRVKRAKKEEGDIFQTKKVVYKASEERKKDQKEIDSQVMAAIKKHPDRKVLQAYLSSMWGLRSSQYPHRMNF

SEQ ID NO: 407 - protein, 168 aa, Phyllotreta nemorum
MPPVITDFMPQDGSNDWRDAAHSTGTSIMASEFDGGVVIGADSRTTTGAYIANRVSDKLTRVTDHIYCCRSGSAADTEAIADIVGYHLNFHGMELGEEPSVEVGAAIFKELCYNYRDSLMAGILVAGWDKKKGGQIYSIPIGGMCVRQEVSIGGSGSSYVYGYMDANY

SEQ ID NO: 408 - protein, 248 aa, Phyllotreta nemorum
MAGKGDGKGEASILKLENQIAVIKYVILFTNVLQWALGGAIFALCLWMRFEEGIQEWLQKLDSEQFYNGVYVLIVASLIVMIVSFLGCISALQENTVTLLAYIGTQVLSFIFGLAGSAVLLDNSARDSHFQPRIRESMRRLIMNAHHEPSRVTLAMIQENIGCCGADGAEDYLSLQQPLPSQCRDTVTGNPYFHGCVDELTWFFEEKCAWIAALAMCICFFNVFSIVLSTVLIQALKKEEEQSETYRK

SEQ ID NO: 409 - protein, 1005 aa, Phyllotreta nemorum
MNITSAAGIISLLEEPRPELKVFALRKLDSIVDEFWPEISEAIEKIEILHEDKVFQQHQLAALVASKVYYHLGAFEDSLTYALGAGDLFDVNARTEYVETTLAKCIDFYTQQRIALAEGSTDAKPIDSRLEAIVSRMFQRCLDDGQYRQAMGLALETRRMDIFELSITQADDVISMLTYAFQVAMSLIQNRAFRNTVLRSLVGLYRGLTTPDYVNMCQCLIFLDDPLSVAEILDKLVSGKEESELMAYQIAFDLYESATQQFLERVLVALRATAPIPSLLEEKVKSKTAEQSSSTSTEATKEPVSSEIKSETKEEKSFEALTESEKEHQKRIEKLHTILSGEVSIELHLQFLIRSNHADLLILKQTKETVRVSICHTATVIANAFMHSGTTSDQFLRDNLEWLARATNWAKLTATASLGVIHRGHEQEALTLMQSYLPKEVGPSSGYSEGGGLYALGLIHANHGANIIDYLLGQLKDAQNEMVRHGGCLGLGLAAMGSQRQDVYEQLKFNLYQDDANTGEAAGIAMGMVMLGSSNPTTIMDMVAYAQESQHEKILRGLAVGISFTMYGRLEEADTLIQQLTSDKDPILRRSGMYTLAMAYCGTGHNQAIRKLLHVAVSDVNDDVRRAAVTALGFLLFRTPEQCPSVVSLLAESYNPHVRYGAAMALGIACAGTGLREAIALLEPMVMFDPVNFVRQGALIASAMILIQQTEQTCPKVSFFRQTYSQVISNKHEDVMAKFGAILAQGIIDAGGRNVTLSLQSRTGHTNMLAVVGTLVFTQYWYWFPLSHCLALAFTPTCVIALNAQLKMPKLEFKSNAKPSLYAYPAPMEEKKREEREKVTTAVLSIAARQRRRDHERKHRDEKMDVDEDKDDKKTEKEEKEKKSEDKKEEKKSDDKKTDEKKAASSSDDKKDKKDEKEEKKKEPEPNFEILQNPARTMRQQLKVITLNDNSQYVAMKDVSIGGLVMVRNLKPGEEELVEPVAAFGPKGDDEKEPEPPEPFEWTED

SEQ ID NO: 410 - protein, 128 aa, Phyllotreta nemorum; identical to SEQ ID NO: 389

SEQ ID NO: 411 - protein, 607 aa, Phyllotreta nemorum
MSSFKRDKKEEEDGVGNIFQNIEKTTVLQEARVFNETSVNPRKCTLILTKLLYLLNQGEALNVKEATDVFFAMTKLFQSKDVILRRMVYLGIKELSSTADDVIIVTSSLTKDMTGKEDIYRAAAIRALCSITDATMLQAIERYMKQAIVDRNSAVSSAALVSSLHMTKMAPEVVKRWVNEAQEAINSDNVMVQYHALGLLYHIRKTDRLAVTKLIAKLTRTTLKSPYAVCMLIRIIAKLLEEEDSGNDFPYFDFIESCLRHKSEMVVYEAAHAIVNLKRTTSKELAPAVSVLQLFCGSPKATLRFAAVRTLNQVAISHPAAVTACNLDLENLITDSNRSIATLAITTLLKTGAESSVDRLMKQIASFVSEISDEFKVVVVQAIRALALKFPRKHNTLMNFLSAMLRDEGGLEYKASIADTIITIIEDNPEAKESGLAHLCEFIEDCEHVSLAVRILHLLGREGPKTKQPSRYIRFIYNRVILECPSIRAAAVSAMAQFGASCPDLLENIQVLLARCQMDSDDEVRDRATYYSSILSKNDKNLYNNFILDTLQVSIPSLERSLKEYTQNPTNQPFDIKSVPLQVGPSPDEREKKHKSEGMLTSQGPVR

SEQ ID NO: 412 - protein, 166 aa, Phyllotreta nemorum
MAKEKAPAIIFIDELDAIGTKRFDSEKAGDREVQRTMLELLNQLDGFSSTSDIKVIAATNRVDILDPALLRSGRLDRKIEFPHPNEEARARIMQIHSRKMTVNPDVNFEELARSTDDFNGAQCKAVCVEAGMIALRRNATAVTHEDYMDAIMEVQAKKKANLNYYA

SEQ ID NO: 413 - protein, 213 aa, Phyllotreta nemorum
MSFFSKIFGGKEKDTGPTPGEAIQKLRETEEMLYKKQEFLEKKIEEYTLVAKKNASKNKRVALQALKKKKRLEKTQLQIDGTLTTIEMQREALEGASTNTAVLDSMKNAAEALQKAHKNLNVDDVHDIMDDIAEQHDIANEITTAISQPVGFNDDLDEDELESELEKLEQEGLEEDLLKVPGPTELPAVPTGAIAKPVKPAAKKVDEDDDMKE

SEQ ID NO: 414 - protein, 202 aa, Phyllotreta nemorum
MNPEYDYLFKLLLIGDSGVGKSCLLLRFADDTYTESYISTIGVDFKIRTIDLDGKTIKLQIWDTAGQERFRTITSSYYRGAHGIIVVYDCTDQDSFNNVKQWLEEIDRYACDNVNKLLVGNKSDLTTKKVVDFNTAKEYADQLGIPFLETSAKNATNVEQAFMTMAAEIKNRLGPPTAAADQGNKVRFDQSRPVETTKSGCC

SEQ ID NO: 415 - protein, 85 aa, Phyllotreta nemorum
MAGNKQDLANKRMVEYEEAQTYADENGLLFMETSAKTAMNVNDIFLAIAKKLPKNEQTSGQGGSAQGRRLAEGDAGAKAPGNCCK

SEQ ID NO: 416 - protein, 182 aa, Phyllotreta nemorum; identical to SEQ ID NO: 395

SEQ ID NO: 417 - protein, 1684 aa, Phyllotreta nemorum
MTQQLLPIKFQEHLQLTNVGINAANITFATLTMESDKYICVREKVGETSHVVILDMADTANPIRRPITAESAIMNPASKVIALKGKAGIETQKTLQIFNIEMKSKMKAHTMTEDVNFWKWISPNTLALVTETSIYHWSMEGDSIPQKMFDRHSSLNGCQIINYRTDPKQNWLLLVGISAQQSRVVGAMQLYSVERKCSQPIEGHAASFATFKMEGNPEPSTLFCFAVRTLQGGKLHIIEVGQNPAGNQPFPKKSVDVFFPPEAQNDFPVAMQVSTKYDVIYLITKYGYIHMYDIESGTCIYMNRISSDTIFVTAPHESTGGIIGVNRRGQVLSVSVDEENIIRYINTVLHNADLALRLATRNNLAGAEELFVSKFQMLFQNGQYAEAAKVAANAPKGILRTPATIQMFQQVPTQPGQNSPLLQYFGILLDQGQLNRYESLELCKPVLLQGRKQLLEKWLKEEKLECSEELGDLVKQADPTLALSVYLRANVPAKVIQSFAETGQFQKIVLYAKKVSYTPDYVFLLRQVMRTNPDQGAAFAGMLVADEEPLADINQIVDIFMEQNMVQQCTAFLLDALKNNRPTEGHLQTRLLEMNLMSAPQVADAILGNNMFTHYDRAHVAQLCEKAGLLQRALEHYTDLYDIKRAVVHTHLLPADWLVNFFGTLSVEDSLECLKAMLTANIRQNLQICVQIATKYHEQLTTKALIDLFESFKSYEGLFYFLGSIVNFSQDQEVHFKYIQAACKTGQIKEVERICRESNCYNAERVKNFLKEAKLTDQLPLIIVCDRFDFVHDLVLYLYRNSLQKYIEIYVQKVNPSRLPVVVGGLLDVDCSEDIIKNLILVVRGQFSTDELVEEVEKRNRLKLLLPWLESRVHEGCVEPATHNALAKIYIDSNNNAERFLKENQWYDSRVVGRYCEKRDPHLACVAYERGQCDRELIAVCNENSLFKSEARYLVRRRDGELWAEVLQETNPYRRQLIDQVVQTALSETQDPEDISVTVKAFMTADLPNELIELLEKIVLDNSVFSEHRNLQNLLILTAIKADATRVMDYINRLDNYDAPDIANIAINNHLYEEAFAIFKKFDVNTSAIQVLIEQVNNLDRAYEFAERCNEPAVWSQLAKAQLNQGLVKEAIDSYIKADDPSAYIDVVETASKNDSWEDLVRYLQMARKKARESYIESELIYSYAKTGRLADLEEFISGPNHADIQKIGDRCFDDKMYDAAKLLYNNVSNFARLAITLVHLKEFQGAVDSARKANSTRTWKEVCFACVDAEEFRLAQMCGMHIVVHADELQDLINYYQDRGYFEELIGLLEAALGLERAHMGMFTELAILYSKYKPARMREHLELFWSRVNIPKVLRAAEQAHLWAELVFLFDKYEEYDNAVLAMMTHPTEAWREGHFKDIITKVANIELYYKAIQFYLDFKPLLLNDLLLVLAPRMDHTRAVAFFTKTGHLQLVKSYLRSVQNLNNKAINEALNSLLIEEEDFQGLRTSIDAFDNFDNIGLAQRLEKHELTEFRRIAAYLYKGNNRWKQSVELCKKDRLFRDAMEYTSESRNQELAEELLAWFLDRKAYDCFSACLYHCYDLLRPDVILELAWKHNIMDFAMPFLIQVTRELTTKVEKLEQSDAQRQSEAAEETNKPIMMPEPQLMLTAGPGMGIPPQQYMPQQTYAQVGYAPQMAYQGYPGM

SEQ ID NO: 418 - protein, 836 aa, Phyllotreta nemorum
MLTKFETKSARVKGLSFHPKRPWILASLHNGCIQLWDYRMCTLLEKFDEHDGPVRGICFHNQQPLFVSGGDDYKIKVWNYKQKRCIFTLLGHLDYIRTTMFHHEYPWIVSASDDQTIRIWNWQSRTCICVLTGHNHYVMCATFHPSEDLLLSASLDSTVRVWDISGLRKKNVSPGPSGLEDHLKNPGATELFGQADAVVKHVLEGHDRGVNWASFHPFLPLIASGADDRQIKLWRMNDSKAWEVDTCRGHYNNVSCVLFHPRQELILSNGEDRSIRVWDMSKRTCLHTFRREHERFWVMTSHPNLNLFAAGHDGGMVIFKLERERPAYTVHGNLLYYVKEKYLRKLDFTTSKDVPVIQIRGGGKIPVYRMSFNPAENAVLLSTRTSNLDNSTYDLYMIPKDQERDDHVPEAESKRSSGLTALWVARNRFAVLDRTHQLIIKNLKNEVTKKVQTPTCDEVFYAGTGMLLLRDSEHVTLFDVQQKRTLAQVKISKCRYVVWSSDMSHLALLSKHNVTICNRKLDVLCSLHENTRVKSGAWDDSGVFIYTTSNHIKYTLKNGDHGIIRTLDLPIYITRVKGSQVFCLDRECKPRLLVIDPTEYKFKLALINHKYEEVLYMVRNSRLVGQSIISYLQQKGYPEVALHFVKDDKTRFALALECGNIEIALEAAKALNDKNCWDQLAQAALWQGNHQIVEMCYQRTKSFEKLSFLYLITGNLEKLRKMMKIAEIRKARSSQYHAALLLGDLEERVKLLKASNQLSLAYLTAATHGMREEAEQLKEQIGDDKKLPDVDPKAKFLKPPPPIQQAESNWPLLTVSRSFFENTAAAATASANMKSL

SEQ ID NO: 419 - protein, 183 aa, Phyllotreta nemorum
MGRYAREPDNAAKSCKARGSNLRVHFKNTCETANAIRKMPLKRAVAYLKNVVVQKECIPFRRFNGGVGRCAQAKQFGTTQGRWPKKSAEFLLQLLRNAESNADYSGLDVDRLVVEHIQVNRAACLRRRTYRAHGRINPYMSSPCHIELWLTEGESSPEAPKKSNKKKATEKKRPKSSVAAVAH

SEQ ID NO: 420 - protein, 104 aa, Phyllotreta nemorum
MVNVPKQRRTFCKKCKVHKLHKVTQYKKSKERHASQGRRRYDRKQQGFGGQTKPIFRKKAKTTKKIVLRMECADCKYRMQFPLKRCKHFELGGDKKRKGQMIQF

SEQ ID NO: 421 - protein, 776 aa, Phyllotreta striolata
MTTYEEYIQQNEDRDGIRFTWNVWPSSRIEATRLVVPLACLYQPLKERVDLPPIQYDPVLCTRNNCRAILNPLCQVDYRAKLWVCNFCFQRNPFPQQYAAISEQHQPAELMPMFSTLEYTINRVQCLPPIFLYVVDTCMDEEELGSLKDSLQMSLSLLPQNALIGLITFGKMVQVHELGTEGVSKSYVFRGTKDLTAKQVQEMLGIGKVAMTQQQQPQQPGQPMRPGQPQSAPVPPGSRFLQPISKCDMNLTDLIGEQQKDPWPVHQGKRPLRCTGVALSIAIGLLECTYANTGARVMLFVGGSCSQGPGQVLNDDLKQPIRSHHDIQKDNAKYMKKAIKHYDTLAMRAATNGHCIDIYSCALDQTGLMEMKQCANSTGGHMVMGDSFNSSLFKQTFQRVFTRDQKNELKMAFNGTLEVKCSRELKVQGGIGSCVSLNVKSQLVSDTEIGMGNTVQWKMCTLTPSTTMALFFEVVNQHSAPIPQGGRGCIQFITQYQHSSGQRRIRVTTVARNWADATTNIHHISAGFDQEAAAVIMARMAVYRAESDESPDVLRWVDRMLIRLCQKFGEYNKDDAGSFRLGQNFSLYPQFMYHLRRSQFLQVFNNSPDETSFYRHMLMREDLTQSLIMIQPILYSYSFNGPPEPVLLDTSSIQPDRILLMDTFFQILIFHGETIAQWRNLKYQDMPEYENFRQLLQAPIDDAQEILQTRFPMPRYIDTEQGGSQARFLLSKVNPSQTHNNMYSYGGDAGAPVLTDDVSLQVFMDHLKKLAVSSTA

SEQ ID NO: 422 - protein, 905 aa, Phyllotreta striolata
MPLRLDIKRKLTARSDRVKCVDLHPTEPWMLCSLYSGNINVWNHENQQLVKTFEVCDLPVRAAKFVPRKNWIVSGSDDMQIRVFNYNTLDRVHAFEAHSDYVRSIVVHPTQPYILTSSDDMLIKLWNWEKAWACQQVFEGHVHYIMQISINPKDNNTFASASLDRTIKVWQLGASTANFTLEGHEKGVNCVDYYHGGDKPYLISGADDRLVKIWDYQNKTCVQTLEGHGQNVTAVCFHPELPIALTGSEDGTVRVWHANTHRLESSLNYGFERVWAIFCLKGSNNVALGYDEGSILVKVGREEPAVSMDASGGKIIWARHSELQQANLKALPEGGEIRDGERLPVSIKDMGACDIYPQTIQHNPNGRFVVVCGDGEYIIYTAMALRNKAFGSAQEFVWAQDSSEYAIRESGSTIRIFKNFKEKKNFKSDFGAEGIYGGYLLGVKSVSGLAFYDWETLDLVRRIEIQPRSIYWSDSGKLVCLATEDSYFILSYDVEEVQKARDNNQVADDGVESAFNLLGEVNESVRTGLWVGDCFIYTNAVNRINYFVGGELVTIAHLDGPLYVLGYVPKDDRLYLVDKELRVVSYQLLLSVLEYQTAVMRRDFSTADRVLPSIPKEHRTRVAHFLEKQGFKQQALAVSTDPEHRFELAVALEDLNTAKMLAQEANNPQKWSQLADLAASTNNLVLAKECMQKAQDYGGLLLLATSSGDDEVVRTLGEATEAEGKHNLAFLSHLLVGDLNKCLDILISTGRLPEAAFFARSYLPDKISEVVELWRAQLSITNQKAGQSLADPKDYDNLFPGLQEAIVAQKYLEQNNSGFIPAAAAATVTPNHERNVIAEVEAKVKGGAGVMPSTSHPSVTLPSEQMEKLSITQDDDDLDLDLDGVNIDENIDTTDINIDDDLLSD

SEQ ID NO: 423 - protein, 956 aa, Phyllotreta striolata
MTAVEQPCYTLINLPTDSEPYNEMQLKMDLEKGEIKVKIRALERIIHMILAGERLPNGFLMTIIRNVLPLQDHLAKKLLLIFWEIVPKTTPDGKLLQEMILVCDAYRKDLQHPNEFLRGSTLRFLCKLKEPELLEPLMPSIRICLEHRHSYVRRNAVLAIFTIYKNFEFLIPDAPELISTYLDGEQDMSCKRNAFLMLLHADQDRALTYLSNCLDQVASFGDILQLVIVELIYKVCHSNPTERSRFIRCIYNLLNSSSPAVRYEAAGTLITLSSAPTAIKAAASCYIELIIKESDNNVKLIVLDRLIALKEHPSHERVLQDLVMDILRVLSAPDLEVRKKTLNLALELVSSRNVEEMVFVLKKEVSKTMDSEHEDTGKYRQLLVRTLHSCCIKFPDIAATVIPVLMEFLSDSNELAATDVLLFLREAIQKFDNLEPLIIEKLLETFKDIKSVKVHRAALWILGEYATSTGDIEAVIKEIVHTLGECPLLETEQKIISGSTEESAPVHAPAGATTLVTSDGTYATQSAFNVASKSTKEKRPPLRQYLMDGDFFIAASLASTLTKLALRYGENASPSDRNKFDAEVMLIMAGILHLGKSGLPVKPITNDDNDHILFCLRVLSDRTEPVVQVFSRLCRNALNDMLLAKETEEATDQKSREKSRAAVQTDDAITFVQLESDRSGELGENVFETSLSQALMGGKTGQSDSSVGSSKLNKIAQLTGFSDPVYSEAYVHVNQYDIVLDVLVVNQTSDTLQNCTLELATLGDLKLVEKPQPVVLAPKDFCNIKANVKVASTENGIIFGNIVYDVTGAASDRNVVVLNDIHIDIMDYIVPASCTDSEFMRMWAEFEWENKVTVNTPLTDLNEYLEHLLKSTNMKCLTSEKALGGQCGFMAANMYAKSIFGEDALANLSIEKPFNKPDAPVAGHIRIRAKSQGMALSLGDKINMTQKGTQSKVVAA

SEQ ID NO: 424 - protein, 246 aa, Phyllotreta striolata
MEDGRTLSDYNIQKESTLHLVLRLRGGMQIFVKTLTGKTITLEVEPSDTIENVKAKIQDKEGIPPDQQRLIFAGKQLEDGRTLSDYNIQKESTLHLVLRLRGGMQIFVKTLTGKTITLEVEPSDTIENVKAKIQDKEGIPPDQQRLIFAGKQLEDGRTLSDYNIQKESTLHLVLRLRGGMQIFVKTLTGKTITLEVEPSDTIENVKAKIQDKEGIPPDQQRLIFAGKQLEDGRTLSDYNIQKESTL

SEQ ID NO: 425 - protein, 200 aa, Phyllotreta striolata
MECLLGIKFDDFVLVAADMTAAQSIIVMKTDENKLFKLSNKLVMAVSGESGDTTQFAEYIAKNIQLYKMRNTYELSPSEAASFTRRNLADALRSRSPYHVNLLLAGYDEKEGPQLYYMDYLASTIKVNYAAHGYGGFFSLSIMDRNYSKSLSREEGYELLKKCVKEVQKRLIINLPNFKVQCVGKDGITDLPDITPKDLA

SEQ ID NO: 426 - protein, 204 aa, Phyllotreta striolata
MADDEKKKLEEEKKRKQAEIERKRAEVRARMEEASKAKKAKKGFMTPERKKKLRLLLRKKAAEELKKEQERKAAERRRIIEERCGKPKLIDDANEGQLKKICKDYYDRMYICEEQKWDLEREVRKRDWEISELNSQVNDLRGKFVKPTLKKVSKYENKFAKLQKKAAEFNFRNQLKVVKKKEFTLEEEDKETKKADKAEWQTKK

SEQ ID NO: 427 - protein, 264 aa, Phyllotreta striolata
MVEKKKAETAPAEAPKKVHKPGKPRNYDLGNGVMRFSRTKMFHKKALYKFIGKKVKATKKPQKPHVIEKPINGEKNGGKRFVLVKKRRAYYPTQDKIKPRPAKKSFCQHKRSLRTTITPGTVLILLAGSHKGKRVVFLKQLYSGLLLVTGPFSINACPLRRVSQRYVIATSTKIDVSGIKVPDTFNDDYFARKRVKRAKKEEGDIFQTKKEVYKVSEERKKDQTEIDTQVMAAIKKHPDRKVLQAYLSAMWGLRSSQYPHRMNF

SEQ ID NO: 428 - protein, 225 aa, Phyllotreta striolata
MPPVNTDFMPQDGSNDWRDAAHSTGTSIMASEFDGGVVIGADSRTTTGAYIANRVSDKLTRVTDHIYCCRSGSAADTEAIADIVGYHLNFHGMELGEEPSVEVGAAIFKELCYNYRDSLMAGILVAGWDKKKGGQIYSIPIGGMCVRQEVSIGGSGSSYVYGYMDANYKPKMSKEDCVKFVTNTLALAMSRDGSSGGVIRLGIITEEGIERRVVLGNELPKFYEG

SEQ ID NO: 429 - protein, 248 aa, Phyllotreta striolata
MAGKGDGKGEASILKLENQIAVIKYVILFANVLQWALAGAIFALCLWLRFEEGIQEWLQKLDSEQFYNGVYVLIVASLIVMIVSFLGCISALQENTVTLLAYIGTQVLSFIFGLAGSAVLLDNSARDSHFQPRIRESMRRLIMNAHHEPSRVTLAMIQENIGCCGADGADDYLALQQPLPSQCRDTVTGNPYFHGCVDELTWFFEEKCAWIAGLAMCICFFNVFSIVLSTVLIQALKKEEEQAESYRK

SEQ ID NO: 430 - protein, 1006 aa, Phyllotreta striolata
MNITSAAGIISLLEEPRPELKVFALRKLDSIVDEFWPEISEAIEKIEILHEDKVFQQHQLAALVASKVYYHLGAFEDSLTYALGAGDLFDVNARTEYVETTLAKCIDFYTQQRIALAEGATDAKPIDPRLEAIVNRMFQRCLDDGQNRQAMGLALETRRMDIFELSITQADDIISMLTYAFQVAMSLIQNRAFRNTVLRSLVGLYRGLTTPDYVNMCQCLIFLDDALAVAEILDKLVSGKEESELMAYQIAFDLYESATQQFLERVLVALRATAPIPSLLEEKVKSKTAETSSSTSAESGSKDPVVGETKSEAKEEKSIEGLTESEKEHQKRIEKLHTILSGEVSIELHLQFLIRSNHADLLILKQTKETVRVSICHTATVIANAFMHSGTTSDQFLRDNLEWLARATNWAKLTATASLGVIHRGHEQEALTLMQSYLPKEVGPSSGYSEGGGLYALGLIHANHGANIIDYLLGQLKDAQNEMVRHGGCLGLGLAAMGTHRQDLYEQLKFNLYQDDANTGEAAGIAMGMVMLGSSNSTTIMDMVAYAQESQHEKILRGLAVGISFTMYGRLEEADTLIQQLISDKDPILRRSGMYTLAMAYCGTGHNQAIRKLLHVAVSDVNDDVRRAAVTALGFLLFRTPEQCPSVVSLLAESYNPHVRYGAAMALGIACAGTGLREAIALLEPMVMFDPVNFVRQGALIASAMILIQQTEQTCPKVSFFRQTYSQVISNKHEDVMAKFGAILAQGIIDAGGRNVTLSLQSRTGHTNMLAVVGTLVFTQYWYWFPLSHCLALAFTPTCVVALNAQLKMPKLEFKSNAKPSLYAYPAPMEEKKREEREKVTTAVLSIAARQRRRDHERKHRDEKMDVDEDKDDKKTEKEEKEKKSEDKKEEKKSDDKKADDKKAASSSDDKKDKKDEKEEKKKEPEPNFEILQNPARTMRQQLKVITLNDNSQYVAMKDVSIGGLIMVRNLKPGEEELVEPVAAFGPKGDDEKEPEPPEPFEWTED

SEQ ID NO: 431 - protein, 128 aa, Phyllotreta striolata; identical to SEQ ID NO: 389

SEQ ID NO: 432 - protein, 879 aa, Phyllotreta striolata
MSSFKRDKKEEEDGVGNIFQNIEKTTVLQEARVFNETSVNPRKCTLILTKLLYLLNQGEALNVKEATDVFFAMTKLFQSKDVVLRRMVYLGIKELSSTADDVIIVTSSLTKDMTGKEDIYRAAAIRALCSITDATMLQAIERYMKQAIVDRNSAVSSAALVSSLHMTKMAPEVVKRWVNEAQEAINSDNVMVQYHALGLLYHIRKSDRLAVTKLIAKLTRTTLKSPYAVCMLIRIIAKLLEEEDSGNDFPYFDFIESCLRHKSEMVVYEAAHAIVNLKRTTSKELAPAVSVLQLFCGSPKATLRFAAVRTLNQVAISHPAAVTACNLDLENLITDSNRSIATLAITTLLKTGAESSVDRLMKQIASFVSEISDEFKVVVVQAIRALALKFPRKHNTLMNFLSAMLRDEGGLEYKASIADTIITIIEDNPEAKESGLAHLCEFIEDCEHVSLAVRILHLLGREGPKTKQPSRYIRFIYNRVILECPSIRAAAVSAMAQFGASCPDLLENIQVLLARCQMDSDDEVRDRATYYSSILSKNDKNLYNNFILDTLQVSIPGLERSLKEYTQNSTNQPFDIKSVPLQVGPSPDEREKKHKSEGMLSSQGPLRPPPVSREENFAEKLSAIPGIQQLGPIFKSSDVVELTESETEYFVRCIKHCFAHHVVLQFDCLNTLPDQLLEDVRVELEPSEGFELLSVIPCKQLHYNETNHTYAILKFPDDDLPSCVGTFGAVLKFIVKDCDPTTGIPDSEEGYNDEYILEDLEITLGDQIQRVSKVNWGAAWETAAESSVEKEDTYSLSSMNTLDEAVKNIVQFLGLQPAERTDKVPEGKSTHTLLLSGVFRGGIDILVRAKLALADGVTMQLTVRSPDDSIAELITSSVG

SEQ ID NO: 433 - protein, 427 aa, Phyllotreta striolata
MSTLEDKSIWEDGEEALGEEVLRMSTDVIIGHTRLLDNEIKIMKSEVMRINHELQAQNEKIKENTEKIKVNKTLPYLVSNVIELLDVDPQEEEEDGAVVDLDSQRKGKCAVVKTSTRQTYFLPVIGLVDEEKLKPGDLVGVNKDSYLILETLPAEYDARVKAMEVDERPSEQYSDIGGLDKQIQELIEAVVLPMTHKDKFVNLGIHPPKGVLLYGPPGTGKTLLARACAAQTKSTFLKLAGPQLVQMFIGDGAKLVRDAFALAKEKAPAIIFIDELDAIGTKRFDSEKAGDREVQRTMLELLNQLDGFSSTSDIKVIAATNRVDILDPALLRSGRLDRKIEFPHPNEEARARIMQIHSRKMTVNPDVNFEELARSTDDFNGAQCKAVCVEAGMIALRRNATAVTHEDYMDAIMEVQAKKKANLNYYA

SEQ ID NO: 434 - protein, 219 aa, Phyllotreta striolata
MSFFSKIFGGKEKDTGPTPGEAIQKLRETEDMLYKKQEFLEKKIEEYTLIAKKNASKNKRVALQALKKKKRLEKTQLQIDGTLTTIEMQREALEGASTNTAVLDSMKNAAEALQKAHKNLNVDDVHDIMDDIAEQHDIANEITTAISQPVGFNDDLDEDELESELEKLEQEGLEEDLLKVPGPTELPAVPTGAIAKPVKPAAKKVEDDDDMKELEAWAS

SEQ ID NO: 435 - protein, 202 aa, Phyllotreta striolata
MNPEYDYLFKLLLIGDSGVGKSCLLLRFADDTYTESYISTIGVDFKIRTIDLDGKTIKLQIWDTAGQERFRTITSSYYRGAHGIIVVYDCTDQDSFNNVKQWLEEIDRYACDNVNKLLVGNKSDLTTKKVVDFNTAKEYADQLGVPFLETSAKNATNVEQAFMTMAAEIKNRLGPPTAAADQGNKVRFDQSRPVETTKSGCC

SEQ ID NO: 436 - protein, 216 aa, Phyllotreta striolata
MATNRTGAAQRPNGATQGKICQFKLVLLGESAVGKSSLVLRFVKGQFHEYQESTIGAAFLTQTICLDDTTVKFEIWDTAGQERYHSLAPMYYRGAQAAIVVYDITNQDTFGRAKTWVKELQRQASPTIVIALAGNKQDLANKRMVEYEEAQTYADENGLLFMETSAKTAMNVNDIFLAIAKKLPKNEQTSGQGGSAQGRRLAEGDAGAKAPGNCCK

SEQ ID NO: 437 - protein, 182 aa, Phyllotreta striolata; identical to SEQ ID NO: 395

SEQ ID NO: 438 - protein, 1684 aa, Phyllotreta striolata
MTQQLLPIKFQEHLQLTNVGINAANITFATLTMESDKYICVREKVGETSQVVILDMADTANPIRRPITAESAIMNPASKVIALKGKAGIETQKTLQIFNIEMKSKMKAHTMSEDVFFWKWISPNTLALVTETSIYHWSMEGDSIPQKMFDRHSSLNGCQIINYRTDPKQNWLLLVGISAQQSRVVGAMQLYSVERKCSQPIEGHAASFATFKMEGNPEPSTLFCFAVRTLQGGKLHIIEVGQNPAGNQPFPKKSVDVFFPPEAQNDFPVAMQVSTKYDVIYLITKYGYIHMYDIESGTCIYMNRISSDTIFVTAPHESTGGIIGVNRRGQVLSVSVDEESIIRYINTVLHNADLALRLATRNNLAGAEDLFVSKFQMLFQNGQYAEAAKVAANAPKGILRTPATIQMFQQVPTQPGQNSPLLQYFGILLDQGQLNRYESLELCKPVLLQGRKQLLEKWLKEEKLECSEELGDLVKQADPTLALSVYLRANVPAKVIQSFAETGQFQKIVLYAKKVSYTPDYVFLLRQVMRTNPDQGAAFAGMLVADEEPLADINQIVDIFMEQNMVQQCTAFLLDALKNNRPTEGHLQTRLLEMNLMSAPQVADAILGNNMFTHYDRAHVAQLCEKAGLLQRALEHYTDLYDIKRAVVHTHLLPADWLVNFFGTLSVEDSLECLKAMLTANIRQNLQICVQIATKYHEQLTTKALIDLFESFKSYEGLFYFLGSIVNFSQDQEVHFKYIQAACKTGQIKEVERICRESNCYNAERVKNFLKEAKLTDQLPLIIVCDRFDFVHDLVLYLYRNSLQKYIEIYVQKVNPSRLPVVVGGLLDVDCSEDIIKNLILVVRGQFSTDELVEEVEKRNRLKLLLPWLESRVHEGCVEPATHNALAKIYIDSNNNAERFLKENQWYDSRVVGRYCEKRDPHLACVAYERGQCDRELIAVCNENSLFKSEARYLVRRRDGELWAEVLQESNPYRRQLIDQVVQTALSETQDPEDISVTVKAFMTADLPNELIELLEKIVLDSSVFSEHRNLQNLLILTAIKADATRVMDYINRLDNYDAPDIANIAINNHLYEEAFAIFKKFDVNTSAIQVLIEQVNNLDRAYEFAERCNEPAVWSQLAKAQLNQGLVKEAIDSYIKADDPSAYIDVVETASKNNSWEDLVRYLQMARKKARESYIESELIYSYAKTGRLADLEEFISGPNHADIQKIGDRCFDDKMYDAAKLLYNNVSNFARLAITLVHLKEFQGAVDSARKANSTRTWKEVCFACVDAEEFRLAQMCGMHIVVHADELQDLINYYQDRGYFEELIGLLEAALGLERAHMGMFTELAILYSKYKPARMREHLELFWSRVNIPKVLRAAEQAHLWAELVFLFDKYEEYDNAVLAMMMHPTEAWREGHFKDIITKVANIELYYKAIQFYLDFKPLLLNDLLLVLAPRMDHTRAVAFFSKTGHLQLVKSYLRSVQNLNNKAINEALNSLLIEEEDFQGLRTSIDAFDNFDNIGLAQRLEKHELTEFRRIAAYLYKGNNRWKQSVELCKKDRLFRDAMEYTSESRNQELAEELLAWFLDRKAYDCFSACLYHCYDLLRPDVILELAWKHNIMDFAMPFLIQVTRELTTKVEKLEQSDAQRQSEAAEETNKPIMMPEPQLMLTAGPGMGIPPQQYMPQQTYAQVGYAPQMAYQGYPGM

SEQ ID NO: 439 - protein, 1223 aa, Phyllotreta striolata
MLTKFETKSARVKGLSFHPKRPWILASLHNGCIQLWDYRMCTLLEKFDEHDGPVRGICFHNQQPLFVSGGDDYKIKVWNYKQKRCIFTLLGHLDYIRTTTFHHEYPWIVSASDDQTIRIWNWQSRTCICVLTGHNHYVMCATFHPSEDLLLSASLDSTVRVWDISGLRKKNVAPGPTGLEDHLKNPGATELFGQADAVVKHVLEGHDRGVNWASFHPFLPLIASGADDRQIKLWRMNDSKAWEVDTCRGHYNNVSCVLFHPRQELILSNGEDRSIRVWDMAKRTCLHTFRREHERFWVMTSHPNLNLFAAGHDGGMVIFKLERERPAYTVHGNLLYYVKEKYLRKLDFTTSKDVPVIQIRGGGKIPVYRMSFNPAENAVLLSTRTSNLDNSTYDLYMIPKDQEREDHVPEAESKRSSGLTALWVARNRFAVLDRTHQLIIKNLKNEVTKKVQTPTCDEVFYAGTGMLLLRDSEHVTLFDVQQKRTLAQVKISKCRYVVWSSDMSHLALLSKHNVTICNRKLDVLCSLHENTRVKSGAWDDSGVFIYTTSNHIKYTLKNGDHGIIRTLDLPIYITRVKGSQVFCLDRECKPRLLVIDPTEYKFKLALINHKYEEVLYMVRNSRLVGQSIISYLQQKGYPEVALHFVKDDKTRFALALECGNIEIALEAAKALNDKNCWDQLAQAALWQGNHQIVEMCYQRTKSFEKLSFLYLITGNLEKLRKMMKIAEIRKARSSQYHAALLLGDLEERVKLLKASNQLSLAYLTAATHGMREEAEQLKEQIGDDKKLPDVDPDAKFLKPPPPIQQAESNWPLLTVSRSFFENTAAAATASANMKSLMAEPVSDVGMEDAQGWGDDDELELDPDEKKAEVAAAGGGDGEGGWDVEDEGLEIPDLGPAATVEAEGNFVHLPTQGPSALVTWTKNSQLVADHVAAGSFESAARLLHDQLGVVNFRPYESLFLNLYSTSKTVSSWQQNVPPSFSYPLRNWKEANIKNQLPASGVKLNDLVAKLQVCYQLTTGGKFTEAIEKLQTLLLSVTLLVVDNKQEISEAQQLLRIASEYICGLQMETLRKTLPKTSAEEQKRQCEMAAYFTHCKLQPIHQILTLRTALNMFFKLKNYKTAASFAKRLLELGPRPEVAQQARKILQACDTNLTDDFQLHYDEHNPFNLCGHSYTPIYRGKAEEKCPLCGTSYLPKYKGVLCNICKVAEVGKDTIGLRISTHQFR

SEQ ID NO: 440 - protein, 183 aa, Phyllotreta striolata; identical to SEQ ID NO: 419

SEQ ID NO: 441 - protein, 104 aa, Phyllotreta striolata
MVNVPKQRRTFCKKCKVHKLHKVTQYKKSKERHAAQGRRRYDRKQQGFGGQTKPIFRKKAKTTKKIVLRMECADCKYRKQFPLKRCKHFELGGDKKRKGQMIQF

SEQ ID NO: 442 - DNA, 2334 bp, Artificial Sequence
  Phyllotreta armoraciae
atgactacttacgaggaatatattcagcaaaatgaggaccgagatggtatccgttttacgtggaacgtgtggccgtccagcaggattgaagccactcgtttggtggtaccattagcctgtctctatcagcctatcaaagaacgagtagatcttcctaccatacaatacgatccagtattgtgcacaaggaacaactgcagggctattttaaatccactgtgtcaagtcgattatcgagctaaattatgggtttgcaacttctgttttcaaaggaatccatttcctcaacaatatgcagctatctctgaacaacatcaacctgctgaattaatgccaatgttctcgactattgagtacacaattaacagagttcattgtttacctcccatattcctgtatgttgtcgatacttgcatggatgaagaagaattaggttctcttaaggactcgttgcaaatgtcgttgagtttgctaccgcaaaacgctttgattggcctgattacatttggaaaaatggttcaagttcatgaattgggtactgaaggtgtcagcaaatcgtacgtattccgaggaactaaagatcttacggctaaacaagttcaggaaatgttgggtattggtaaagtcgcaatggctcaacaacaaccacaaccgcaacaacctggacaacctatgagaccaggacaacctcaatctgcacctgtcccacctggtagcagattcctgcaacctatttcaaagtgtgatatgaatttaacggatttaataggagaacaacagaaagatccttggcctgtgcaccaaggtaaaaggccactgagatgcactggtgttgcattatcgattgctatcggcttattggagtgcacttatgcaaataccggagctagggttatgctttttgttgggggttcttgctcacaaggcccaggtcaagttttgaatgacgatttgaaacaacctattaggtcccatcacgatatccaaaaagataatgcaaaatatatgaaaaaagctattaagcattacgatactttagcgatgagagcagcgactaatggtcactgcattgatatttattcctgtgcactcgatcaaactggtttaatggaaatgaaacaatgtgcaaattctacaggtggtcacatggtgatgggagactcttttaattcatcgctgttcaaacaaacattccaaagggtgttcactagagatcagaaaaacgatttgaaaatggcttttaatggaacattagaagtgaaatgttctcgagaattaaaagtgcaaggaggaattggatcctgtgtatcattaaacgtcaaaagtcaactggtctccgacacagaaatcggcatgggcaacaccgtgcaatggaaaatgtgtacactcactccaagcactacgatggccttgttcttcgaagtcgtcaatcagcatgctgcgccaattccgcaaggaggaagaggctgcatacaattcattactcaatatcaacactcaaatggtcaaagaagaattagagtgacgacagtagctcgaaactgggccgatgccactactaatattcaccacatcagcgctggtttcgatcaagaagctgcagctgtaattatggccagaatggctgtttacagagccgaatctgatgagagtcccgacgttctgagatgggtcgatagaatgctgattcgattgtgccaaaaattcggagaatacaataaagacgatgctggttcattcagattgggtcaaaactttagcctatatccgcaattcatgtatcacctaaggagatctcagttcctgcaagttttcaataattctcctgatgaaacatcgttctatcgacatatgttgatgagagaagatcttactcaatcattgatcatgatccaaccaattttgtacagttacagttttaacggccctcccgagcctgtgctattagatacgagttccatacagcccgatagaatattgcttatggacacgtttttccaaattttgatattccacggggagactatagctcaatggagaaatttgaaatatcaagacatgcccgaatacgagaactttaggcaattattgcaagcacctgttgatgatgctcaagaaatattacaaacaaggtttccgatgccgagatatattgacaccgaacaagggggatcccaggctagatttttattgtcgaaagtcaatccgagtcagactcacaataacatgtattcatacggaggggacgccggcgctccagttttaacagacgatgtatcacttcaagtattcatggatcatttgaaaaaattggcagtttcgtccacggcttga

SEQ ID NO: 443 - DNA, 2721 bp, Artificial Sequence
  Phyllotreta armoraciae
atgccacttcggttagacattaaaagaaagttaacagctcgttctgaccgggtgaaatgcgtcgacctccatcctacggagccctggatgctctgttcgctttacagcggaaacataaacgtatggaatcatgaaaatcagcagctcgttaaaacgttcgaggtatgcgatctgccagtgagagctgcgaaattcgtaccgaggaaaaattggattgttagtggatctgatgatatgcaaattagagtctttaattacaatacattggatcgcgtgcatgctttcgaagctcactctgattatgttcgatcaatcgttgttcatcctacgcagccttatatcttaacaagtagcgatgatatgctaattaagctgtggaactgggagaaagcatgggcatgtcaacaagtgttcgaaggccacgttcactacatcatgcaaatcgccatcaaccccaaagacaacaacacattcgccagcgcctcgttggaccgaacgataaaagtctggcaattgggcgcctctacggcgaacttcacgctcgagggtcacgagaagggcgtcaattgcgtcgattactatcacggcggcgacaaaccctacctgatatcgggcgctgacgacagattggtcaaaatctgggattaccaaaacaaaacgtgcgttcaaacgctggaagggcatgggcaaaacgtgaccgccgtttgtttccatccggaattaccgatcgctctcaccggcagcgaagacggtacggtcagagtgtggcacgcaaacacccatcgattagagagcagtttgaactacggcttcgaacgggtgtggaccattttttgcttgaaaggctccaataatgtcgctctcggttacgacgaaggcagcattctcgttaaagtcggtagagaagagccggccgtgagcatggacgcgagcggagggaaaatcatctgggctaggcattcggagttacagcaggccaatctgaaagccttacccgaaggagctgaaataagagacggggaacgtttgccggtctccatcaaagatatgggcgcttgcgacatttaccctcaaactattcagcacaatcccaacggccggttcgtggttgtttgcggcgatggagaatacatcatttacactgccatggcgctcaggaacaaagccttcggtagcgcgcaggagttcgtttgggcgcaggattccagcgaatacgccatcagagagtcgggatctaccatcagaatattcaagaacttcaaagagaagaagaattttaaatcagactttggagctgaaggcatctacggtggttatctgttgggcgtaaagtctgtatccggattggctttctacgattgggaaactctggatttggttagaaggatcgaaatacaacctcgctcgatatactggtccgatagcggtaaactagtttgtttggccaccgaggacagttatttcatactatcttatgacgttgatgaagttcagaaagcgagggataacaaccaggtggcagatgatggagtggagtccgccttcaatgtcctaggtgaagtaaacgagtctgttcgtacaggtctctgggtaggagattgcttcatttacacgaacgccgtgaaccgtatcaattacttcgttggaggtgaattggtgaccatcgcacatctcgatggcccattgtacgtgctgggctatgtcccgaaggacgatagactctatttggtcgacaaagaattgagagtggtcagttatcagttgcttctttcggtcttggaataccaaaccgccgttatgagaagagatttctcgacagccgatagagtgttgccttcgattccaaaggagcacagaacgagagtagctcatttcttagaaaagcaaggtttcaaacaacaagctctggccgtgagtactgatcctgagcacaggttcgaactggccgtcgctttggaggatttaaataccgccaagatgctggctcaggaagctaacaatccgcagaaatggagtcagctggccgatttggcggcatccacgaataatctcgtattggccaaagagtgcatgcagaaagcccaagattatggcgggttattactcttagctaccagttctggagatgacgaggtagtgagaacattaggcgaagccacggaagccgagggcaagcataacttggcattcttatcccatttattagtcggagacttgaacaaatgtttggatattttgataagcaccggtaggcttcccgaagctgcgtttttcgcaaggtcgtatcttcccgataaaatatccgaggtagtggaactgtggagggctcaattgtcggttactaatcagaaagccgggcaaagtttggcggatcctaaagattacgacaacctgtttcccggtcttcaggaagccattgcggcgcagaaatatttggaacagaacagtcctggaatcataccggctgctgtggccgccaccgttacgccaaatcaagaaagaaacgtcatagcagaagtggaggcgaaggtcaaaggtggccttggtgtattgccgaacacatcgcttccttcggttatgtcgccaagtgaacagatgaagaaactctcgattactcaagatgatgacgatttggatttggaccttgatggagtgaacattgatgaaaatatcgatacaacggatatcaatatagatgaagatgacttgttaagtgattga

SEQ ID NO: 444 - DNA, 2871 bp, Artificial Sequence
  Phyllotreta armoraciae
atgacggcggtcgaacagccctgttacacattaattaatttaccgaccgattcggagccctacaatgaaatgcaattgaaaatggatcttgaaaagggagaagtcaaagtaaagataagggctttggaaagaatcatacacatgatattggcaggcgagagattgcccaacggattcctgatgacaatcatacgaaacgttctgcccctacaagatcaccttgccaagaagcttttgctcattttttgggaaatcgtgccgaaaaccaccgccgacggtaaattactgcaggaaatgatcctagtctgtgacgcctacagaaaggacctgcagcaccccaacgaatttttgcgaggatcaacattaagatttctatgcaagctaaaggagcccgagctgttggagcctctgatgcccagcattcgaatttgcctcgagcacaggcacagctacgttagaaggaatgctgttctggcaatttttacgatttacaagaattttgaatttctcattcctgacgcccctgaattgatttctacttacctagacggcgaacaagatatgtcttgcaaaagaaatgcttttcttatgctcttgcacgccgatcaagatcgagctctcacttacctatccaattgcttagatcaagtcgcttcgtttggggatatcctacagttggttatcgttgaattgatatacaaagtgtgccactccaaccctaccgaaagatcccggtttattcgatgcatatacaatttattgaattcgagcagtcctgctgttaggtacgaggccgccggtactctgattactttgtccagcgctccgacagctataaaagccgccgccagttgttacatcgaattgatcattaaagagagcgacaacaatgtcaaattgatcgttttggatagattgattgccttgaaggaacatcccagccacgagagggtcctgcaggacttggttatggatatattgagagtgctatcggctcctgatttggaagtgcgaaagaaaacgcttaatttagcgctcgaattggtgtcgtctcgtaacgtcgaagaaatggtgtttgtgctgaagaaggaggtgtcaaagactgtggatagcgaacacgaagacaccgggaaatacaggcaattgttggtcagaacattgcactcttgctgcatcaaattccccgatatagctgctacggttattcccgttctgatggaattcctgtccgatagcaacgaattggctgccaccgatgtgttgctatttttgagggaagccatccagaaattcgataatttggagccgctcattatcgagaaattattggagacattcaaagacatcaaatctgtgaaagtacatcgagctgctctttggatattgggcgaatacgccacgtcgactggcgacatagaagccgtcatcaaagagatcattcaaaccttaggcgaatgcccattgttggaaactgagcagaagattatatctggtaatgcagacgaaagtgcaccggttcatgcaccggctggagctaccactttggttacttcagatggaacgtacgccactcagtctgctttcaacgtgtccagcaaatcgacgaaagagaagagacctccattgaggcaatacctgatggacggagactttttcatcgctgcttctctggcctctactttgaccaaactggctttgagatatggtgaaaacgtttccgcttccgataggaataaattcgacgctgaagttatgcttattatggctggaattttgcatctaggcaaatcaggtttgcccgtaaaaccgataaccaacgacgacaacgatcacattctcttctgcctgcgcgtgctatccgatcgaacggagcccgtcatccaagtattctcgagcctctgccgcaacgccctcaacgatatgctgctggcgaaggaaaccgaagaggtgaccgatcaaaaatcgcgggaaaaatctcgagcggccgtccaaaccgacgacgccatcaccttcgtgcaactggagtccgatcgaagcggggagctcggcgaaaacgtcttcgaaacctccctgtcccaagcccttatgggcggtaaaacgggacaatccgactcgactatcggctcgagcaaactgaacaagatcgcccagttgacaggtttctcggatcccgtttactccgaagcatatgtgcatgttaatcagtacgatatcgtactcgacgtgctggtggtgaaccaaacgagcgacacgctgcagaattgcacgctggaactggccactttgggggatttgaagctggtagagaagccgcagcccgtcgtgctggcgccgaaggacttctgcaacatcaaggctaacgtgaaggttgcctcgacagagaacggtatcatattcggtaatatcgtgtacgacgtgacgggcgctgcttcagatagaaacgtcgtcgttttgaacgacattcacatcgatattatggattacattgttccggcatcgtgcaccgattcagagtttatgaggatgtgggctgaattcgaatgggaaaataaggtgacggtcaatacgccgctgacggatctcaacgagtacctggagcatctgctgaagagtactaacatgaagtgtctgacgcctgagaaggcgctcggagggcaatgcggcttcatggcggccaatatgtacgcaaaatcgatctttggggaagacgctttggcgaatttgagcatcgagaagccgtttaacaagccggacgcgccagtcgccggtcacattagaattcgggccaaaagtcagggtatggctttgagtttgggcgacaaaatcaacatgacgcagaaggggacgcaaaataaggtggttgccgcgtaa

SEQ ID NO: 445 - DNA, 819 bp, Artificial Sequence
  Phyllotreta armoraciae
gaaggtatcccaccagaccagcagagattgatcttcgctggaaaacaactagaagatggccgtactctttctgactataacatccaaaaggaatctactcttcacttggttttgagacttcgtggtggaatgcaaatcttcgtaaaaactcttaccggcaagaccattactcttgaagtcgaaccatcagacaccattgagaatgtcaaagctaaaattcaggacaaggaaggtatcccaccagaccagcagagattgatcttcgccggaaaacaactagaagatggccgtactctttctgattacaacatccagaaggaatccactctccacttggttttgagacttcgtggtggaatgcagatcttcgtgaaaactttaaccggaaagactatcaccttggaagtcgagccatccgacaccattgagaatgtcaaagccaaaattcaggacaaggaaggtatcccaccagaccaacagagattgatctttgccggtaagcaattggaagatggccgtactctttccgactacaacatccagaaggaatctactcttcacttggttttgagacttcgtggtggtatgcagatcttcgtaaaaactcttaccggcaagaccattactcttgaagtcgaaccatccgacacaatcgagaatgttaaggctaaaattcaggacaaggaaggtatcccaccagaccagcagagattgatctttgctggtaaacaacttgaagatggccgtactctttccgattacaacatccaaaaagaatctacattgcatttggtactccgtcttagaggaggacagtaa

SEQ ID NO: 446 - DNA, 603 bp, Artificial Sequence
  Phyllotreta armoraciae
atggaatgcctactcgggattaaattcgacgatttcgttttagttgccgccgatatgactgcggcccaaagcataattgttatgaaaacagacgaaaataagctgtttaaattgtctaacaagcttgttatggctgtatcgggagagtctggtgatactacccaatttgccgagtatattgctaagaatattcagctgtataaaatgagaaatacctacgaacttagcccatcggaagcagcatcgtttactcgtaggaatctcgctgatgctcttagaagcaggagtccctatcacgtaaatttgctactagctggatacgacgataaagaaggccctcaattgtactacatggactatttggcgtcgaccattaaagttaattatgctgctcacggttacggaggcttcttctcgttatccatcatggatagaaactacatcaaatctctgagcagagaagaaggctacgagttgttgaaaaaatgtgtgaaagaagttcagaaaagattaatcatcaatttacccaactttaaggtacagtgtgtcggcaaagatggtataacagatttgcccgatatcacgcccaaggatttggcttaa

SEQ ID NO: 447 - DNA, 556 bp, Artificial Sequence
  Phyllotreta armoraciae
atggcggacgatgaggaaaagaagagaaaacaggctgagatcgaacgcaaaagggctgaggtgagggctcgcatggaagaggcctccaaggcgaagaaggccaagaaaggttttatgacccctgaaagaaagaagaaacttaggttattgttgagaaagaaagccgccgaggaattaaagaaggaacaggaaaggaaagcggccgaaagaagacgcatcatcgaagagcgctgtggaaagcccaaattgatcgatgacgccaatgaagaacaacttaagagtatttccaaaatgtatcacgagagaatttgcaagctggaagaccagaaattcgatttggaatatctagtcaaaaagaaagatatggagatcgcggaattgaacagtcaagtgaacgacctcagaggaaaattcgtgaaacccacgttgaagaaggtgtccaaatacgagaacaaattcgccaagttgcagaagaaggccgccgaatttaacttccgcaaccaactcaaagtggtcaagaagaaggagttcaccttagaagaagaagacaaagaga

SEQ ID NO: 448 - DNA, 716 bp, Artificial Sequence
  Phyllotreta armoraciae
atgatttaggaaatggcgttatgaggttttcaagaaccaagatgttccacaagaaggctttatataaatttattggtaaaaaagtcaaggctaccaagaagccacagaagcctcacgttatcgaaaaaccaattaacggagaaaagaacggaggaaaaagatttgtcttagtcaagaaacgtagggcttactatcctactcaagacaagattaagccgaggcctgcgaagaagtccttctgccagcacaaacgttcacttagaactaccattacacccggtactgttcttattttgttggccggttcccacaagggcaagagggtagttttccttaaacaactttactctggtcttctacttgttactggtccgttttcaattaatgcctgtcctttgagacgtattagtcaacgatacgttatcgcaacatctaccaaaatcgatgtcagcggtattaaagttcccgacacctttaacgatgactatttcgcaaggaaacgcgtcaagagggcaaagaaagaagaaggtgatattttccagaccaagaaagaggtttacaaagtaagtgaggaaaggaaaaaggaccagaaggaaatcgacgcgcaggtgatcgctgcgatcaaaaaacaccctgaccataaagtcctccaagcctatttatcatctatgtggggtttgagatcgtctcaatatcctcacagattgaacttttag

SEQ ID NO: 449 - DNA, 654 bp, Artificial Sequence
  Phyllotreta armoraciae
atgcctcaagatggttcgaacgattggagagacgccgctcacagtacaggaacttccattatggcatcagaattcgacggcggagtcgttataggagccgattctcgtacaaccactggggcgtacatcgcaaacagggtgtccgataaactaacgagagtaaccgatcacatttactgctgccggtcaggttctgctgccgatacggaggccatcgcagacatcgtaggctaccatttgaacttccacgggatggaattgggcgaagagccgagcgtagaagtgggagcagccatattcaaggagctgtgctacaactacagggactctctgatggccggcatactcgtagccggttgggataagaagaaaggcggccagatatattccattccgatcggcgggatgtgcgtgagacaggaagtgtcgatcggtggatccggttcgagctacgtgtacggttacatggacgccaattacaaaccgaaaatgtccaaagaagattgcgttaaattcgtcactaatactttggctctcgctatgtctagagatggttcttccggtggtgtaatcagattaggtatcattacggaggaaggtatagaacgtagggttgtattgggtaatgaattgcctaaattttacgaaggctaa

SEQ ID NO: 450 - DNA, 747 bp, Artificial Sequence
  Phyllotreta armoraciae
atggcagggaaaggagacggcaaaggcgaggcgagtatactcaaattggaaaatcagattgccgtcatcaaatacgtgatactctttgccaacgtcttgcaatgggccctcggcggcgcaatctttgccctttgcctttggatgaggttcgaggagggcatccaagaatggctgcaaaaattggattccgaacaattttacaacggagtttatgtacttatagtcgcttcgctgatcgtcatgattgtgtcctttctgggatgtattagtgccctgcaggagaatacggtgacccttttggcctacatcggcacgcaagttctgagcttcatattcggtttagccgggtcggctgttcttctggataacagcgccagagattcccacttccagccgaggattcgggagagcatgcgacgtcttatcatgaatgctcatcacgagccatccagagtaacgctcgccatgattcaggaaaatatcggctgctgcggtgctgacggagcagaagattacttggcgctgcaacagccattaccgagccaatgcagggacaccgtcaccggtaatccctatttccacggatgcgtcgacgagctcacgtggtttttcgaggaaaagtgcgcctggatagccgcattggccatgtgcatttgcttcttcaacgtttttagcatcgtactttccacggttcttatacaggctttgaagaaggaagaagaacagtcagatacttacaggaaataa

SEQ ID NO: 451 - DNA, 3018 bp, Artificial Sequence
  Phyllotreta armoraciae
atgaatattacttcagctgcggggattatatcccttttagaagaaccaagaccagaactcaaagtattcgcgttaagaaaactagattccatagtcgatgaattctggccagaaatttcagaagctattgagaagatagaaattctgcacgaagataaagtattccaacaacatcagttagccgctttggttgctagtaaagtttactatcatctgggggcattcgaagattcattaacgtacgctttgggagctggcgatctgttcgatgtaaatgctagaacagaatacgttgagaccacacttgcaaaatgtatcgacttctatacacaacaacgcatagctttggcggaaggttcaaccgatgcgaaacctatagattcaagactcgaagcgatcgtaaaccgaatgttccaacgttgcttggacgacgggcaatatcgccaggccatgggtctcgccttggagaccaggagaatggacatctttgaattatccatcacacaagccgatgatgttatcagtatgcttacctacgctttccaagtggcgatgagtctaattcagaatcgagcatttcgcaataccgtcttaagatctctagttggcttgtaccgcggtttaactactccggactacgttaacatgtgccaatgtctgatcttcttggacgatccgctatcagttgcggaaattttggataaattagtctctggtaaagaagagtccgaattgatggcttaccaaatagcttttgatctctatgaatccgcaacgcaacagtttttggaacgagttttggtcgcgcttagagctaccgctcccataccttcgctattagaggaaaaggtcaaatctaaaagcgccgaacaatctagtagcacttctgcagaggcccccaaagatcctgttagcagtgaaactaaaagcgaggcgaaagaagaaaagtctattgagggattgactgagagtgaaaaggaacatcaaaagcgaatcgaaaaattgcataccatcttatcgggcgaagtatcgatagaacttcatcttcaatttctgattagatccaaccacgccgatcttcttattctgaagcaaacgaaagaaacggttcgagttagtatttgtcacactgctacagtcatcgctaacgctttcatgcacagcggtactaccagcgatcaatttttaagggataatttggaatggctagccagagcaacgaattgggcgaaactaacagcaacagcgtctttgggtgttatccatcgaggacatgaacaagaggctttgactctcatgcaaagctatttaccgaaggaagttgggccgagttccggatattccgaaggcggcggtctgtacgctcttggtctcattcacgccaatcacggtgctaacataatcgattatcttcttggtcaactaaaagatgctcagaacgagatggttagacacggcggttgtttgggactcggtttggctgctatgggaacacacaggcaagatgtatatgaacagctcaagttcaatctctatcaagacgatgctaataccggagaggctgccggaattgcgatgggtatggttatgctgggatccagtaatccaactactattatggacatggtagcgtacgcgcaagagagccaacacgaaaagattcttcgcggtttggcggtcggcatcagcttcaccatgtacggtcgattagaagaagctgataccttaatacaacagcttacttctgataaggatccgatcctgagaagatccggcatgtacacattagctatggcttattgcggtacaggacataaccaggcgatcagaaaattattacacgtcgcggtttctgatgtaaacgatgacgtgagaagagcagcagtcacagcgctcggtttcctgttgttcagaacccccgagcaatgtcccagcgtggtgtcccttttggcggaaagctacaacccgcacgtgcgttacggggccgccatggcgctgggcatagcctgcgccggcacgggccttcgcgaggccatcgccctgctcgagcccatggtgatgttcgatcctgtgaatttcgtccggcagggggccctaatcgcctcggcgatgatcctcatccagcagaccgagcaaacgtgcccgaaggtcagcttcttcaggcagacctactctcaggtcatttccaacaagcacgaagacgtcatggccaaattcggtgccattttggcgcaaggtataatcgatgccggcggcaggaacgtaactctatcgttacaatccagaacgggccacaccaacatgctggctgtcgttggtacattggtgtttacgcaatattggtattggttccctctgtcgcattgcctggctttagctttcaccccgacgtgcgtggtagcgttgaatacccaactaaagatgcctaaattggagttcaaatcgaacgcgaaaccgagcttgtacgcgtatccagcgcccatggaggagaagaaacgcgaagaaagggaaaaagtcaccacggctgtattaagcatagccgcgaggcaaaggagaagggatcacgagaggaagcatcgcgatgagaaaatggacgtggacgaagataaagacgataagaaaacggaaaaggaggaaaaagagaagaaatccgaagacaagaaagaggagaaaaagtccgatgataaaaaaacggacgataaaaaagcgacgtcgtcgagcgacgacaagaaagataagaaagatgagaaggaggagaagaaaaaggaacccgagcctaatttcgaaatcctgcaaaatcccgcgaggactatgaggcaacaactgaaagtgattacgctaaacgataactcacaatacgttgcaatgaaggacgtttctatcggaggacttattatggttcgcaatttaaaacctggagaagaagagttggtggaacctgtagcagcattcggtccaaagggagatgatgaaaaggaaccagaaccaccagaaccattcgaatggaccgaggattag

SEQ ID NO: 452 - DNA, 387 bp, Artificial Sequence
  Phyllotreta armoraciae
atgcaaattttcgtaaaaactctcaccggtaaaactattaccctcgaggtagaaccatcagacaccatcgaaaatgtcaaagcgaaaattcaagataaggaaggaattcctcccgaccagcagcgattgatttttgcaggtaaacaactcgaagatggccgtaccctttcagattacaacatccagaaggagtctactctccacttggtgctgcgtttgagaggaggaatcatcgagccctctctgcgtcttttggcccaaaagtacaattgcgacaagatgatttgccgcaaatgttacgctagactgcatccgagagctactaattgcaggaaaaccaagtgtggacataccaacaacttgcgccccaagaagaagctgaagtag

SEQ ID NO: 453 - DNA, 2640 bp, Artificial Sequence
  Phyllotreta armoraciae
atgagctcttgtaaaagagagaaaaaggaggaagaagatggagttggaaatatattccaaaacatcgaaaaaactactgttttacaagaagctcgagtgttcaatgaaacatccgtgaatccaagaaaatgtaccctaattcttaccaaattactttacctactaaatcagggggaagctttaaacgtaaaagaagccacagatgttttctttgcaatgactaaactattccagtcaaaagacgtaatccttcggagaatggtctatctaggaattaaagagctaagctcgaccgcagatgatgtaatcatagtgacttcgagcctcaccaaagatatgacgggcaaagaagacatttacagagcagccgctatacgtgctttatgcagcattaccgatgctaccatgctgcaagccatcgaacgctacatgaaacaagccatcgtcgatagaaattctgctgtcagttcggcagcattggtcagttctttgcacatgaccaaaatggcacctgaagtggttaagagatgggtaaacgaagcgcaggaagctattaatagtgataatgtgatggtgcaatatcatgccttggggctcctgtatcacatcagaaaaacagataggctggctgttacaaaattaatagctaaactaaccagaactactctgaaatctccatacgctgtttgcatgctcatcagaataatagccaagctactcgaagaagaagattctggcaatgattttccctattttgatttcatcgaatcttgcctaaggcacaaatctgagatggtagtttacgaagcagcccacgccatcgttaatctcaaaggtaccactagcaaagaactggcgccggctgtgagcgtattacaattgttctgcggttcaccgaaggctactttgagattcgccgccgttagaactctgaatcaagtggccatatcccatccggccgctgtgacggcttgtaatttggatttggagaatttgattactgattctaatcgatcgatagctactcttgctatcactactttattgaaaactggtgctgaatcgtccgttgatcgtcttatgaaacaaatagcgagttttgtgtctgaaattagcgatgaattcaaagttgtagtagtccaagcgatcagagcgctggctcttaaattccctcgaaagcacaacactctcatgaactttttatcggctatgctaagagacgaaggcggtttggaatacaaagcttccattgcagacaccataatcactataatcgaagataatcccgaagctaaagaatctggtttggctcatctgtgcgagtttattgaagattgcgaacacgtttctttagctgttagaatattgcatctgttgggtagagaaggaccgaaaaccaagcaaccttctaggtacatccgtttcatctacaatcgcgtcatcttagagtgcccttccatcagagcagccgctgtttctgccatggctcaattcggagcttcttgtcctgatttgttggaaaatattcaagtactactagccagatgccaaatggactctgacgatgaagttagagacagagccacttattacagcagcatacttaacaaaaacgataaaaacttgtacaacaattttatcctagatactttacaggtatctataccatcgttagaacgctcgctgaaagagtacacgcagaaccctacgaatcaaccgtttgatataaaatcagttccgctgcaagtcggcccgtctccggacgagcgcgagaagaagcacaaatccgaaggcatgctgacgtcgcaagggcccgtgcgcccgccgcccgtatcccgagaagagaactttgccgagaaactgtcggccataccgggcatccagcagctcggtccgatcttcaagagctccgaagtggtggagctgaccgaatccgagacggagtacttcgtgcggtgcatcaagcattgcttcgcccatcacgtcgtgctgcagttcgattgcctgaacacgctgcccgatcaactgctggaggacgtgcgggtggagttggagccgagcgaagggttcgaattgctgtcggtggtaccgtgcaagcagctacattataacgagaccaatcacacctatgccattttgaagttccccgacgacgatttgcctagttgcgttggtactttcggggcggtgttgaagtttatcgttaaagattgcgatcctacgactggcattcccgatagcgacgaaggttataatgatgaatacatactcgaagacttggaaataacgttgggcgatcaaatacaaagagtgagcaaagttaattggggcgctgcttgggaaacggctgctgagagttctgtcgaaaaggaggatacgtattctctcagttcgatgaatacgttggacgaagctgtgaaaaatatcgtgcagttccttggattgcaaccggccgaaagaactgataaagtgcctgaaggcaagagcacacatacgcttctactatcaggagtctttagaggaggtatcgatattttggtaagagctaaacttgctttagcagatggtgttacaatgcaattgactgtaagatcacccgacgacagcatagctgaacttattacctcttctgtaggttaa

SEQ ID NO: 454 - DNA, 1284 bp, Artificial Sequence
  Phyllotreta armoraciae
atgtcgaccttagaagacaaatcgatttgggaagacggcgaagaagcgctcggcgaggagattttaagaatgtccaccgacgttatcataggtcatacgcgattgctggacaacgagattaaaataatgaagagcgaagtgatgcgaataaatcacgaactacaggcgcaaaacgagaagatcaaagaaaacaccgagaaaataaaagtgaacaaaaccttgccttacttggtttcgaacgtaatagaactgttggacgtagatccccaagaagaggaagaggacggtgcagtagtcgatttggattctcagagaaaagggaaatgcgctgtagttaaaacgtccacgagacagacctatttcttacccgtgataggactagtcgatgaggagaaactaaaaccgggagatctagtgggagtgaacaaagactcttatctaattttggaaacattacccgcagagtacgatgccagagtcaaggccatggaagtcgatgagaggccttctgaacagtattccgatatcggaggtttagataaacaaatacaggaacttatagaggctgttgtactacctatgactcataaagacaagttcgttaatttgggaattcatcctcctaaaggtgttctactttacggccccccaggtaccggaaagaccctcctagccagagcctgcgccgcccaaactaaatcaacctttctcaaactggccggtcctcagttagtccagatgttcataggcgacggcgccaagttagtccgggacgccttcgccttggccaaagagaaagcccccgctataatattcatcgacgaattggacgccatcggtacgaagcgattcgactctgagaaagccggcgacagggaagtccaaagaaccatgttggagctgctgaaccaactggacggtttcagttcgacctccgacatcaaagtcatagcagctactaatcgcgtggatatcctggatcccgctctgcttcgatccggacgattggacaggaagatcgaattcccgcatcccaacgaagaggcgagggcgagaatcatgcagattcactccagaaaaatgacggtcaacccggacgttaacttcgaggaattggccaggtctacggacgacttcaacggggctcagtgtaaggctgtgtgcgtcgaagctggtatgatcgctctcagacgtaacgccacggccgtgacgcacgaggactacatggacgctattatggaagttcaagctaagaaaaaggcgaatcttaactattacgcctaa

SEQ ID NO: 455 - DNA, 660 bp, Artificial Sequence
  Phyllotreta armoraciae
atgagtttttttactaaaatattcggaggaaaggagaaagatacgggtcctacgcccggagaagctatccaaaagctcagggaaaccgaggacatgttatataaaaaacaggagtttttagaaaagaaaatagaggaatacacattagtagccaaaaaaaatgcatcaaagaataagagagttgcgctgcaagcgctcaaaaagaaaaaacgattggagaaaactcaattacaaatagatggaacactcactaccattgaaatgcaaagggaggccctcgaaggggccagcaccaacacagccgtcttagactctatgaagaatgctgctgaagccctacagaaagcacacaaaaacttgaatgttgatgatgtccacgatatcatggatgacatagctgaacagcatgacatcgccaacgaaattactactgctattagccagccggttggcttcaacgatgatttggatgaggatgaattagaaagtgaactagagaagctcgaacaagaaggattggaggaagatttactgaaagttcccggcccaaccgaattacctgctgtacctacaggagctattgctaagcctgttaaacctgctgctaaaaaagtggaggatgatgatgatatgaaggaattggaagcttgggcttcgtaa

SEQ ID NO: 456 - DNA, 609 bp, Artificial Sequence
  Phyllotreta armoraciae
atgaatcctgagtatgattacttattcaagctgcttctcatcggcgattctggagtaggaaaatcgtgtttgctattgagatttgcggatgatacttatacggaaagttatattagtactattggagtagattttaaaatcagaacaatcgacttagatggaaaaacgattaaattgcaaatttgggataccgccggacaggaacgatttagaactataacatcgagttactacaggggcgcgcacggaatcatcgtcgtgtacgattgcacagaccaggactccttcaacaacgtgaaacaatggttggaggaaatcgaccgttacgcatgcgacaacgtcaataaattacttgtagggaataaaagtgatctgacgactaagaaagtcgtcgatttcaatacggccaaggagtacgcggatcagttgggcgtaccatttttggagacgtcggcgaaaaacgccaccaacgtagagcaggcctttatgacgatggcggcggaaattaaaaatcgattaggaccgccgaccgcggccgcagatcaaggaaacaaagttagattcgatcaaagtcgtcctgttgaatcgactaaatcgggatgttgctga

SEQ ID NO: 457 - DNA, 651 bp, Artificial Sequence
  Phyllotreta armoraciae
atggcaacaaatcgaactgtcaccgcccaaagaccaaatggcgctacccagggtaaaatctgtcagttcaaattggtgttgctcggcgagagcgccgtcggtaaatccagtctggtgctgaggttcgtcaagggccagttccacgagtaccaggagagcaccataggggctgctttcctcacgcagaccatttgcttggacgataccaccgttaaattcgaaatatgggacaccgcgggacaagaaaggtatcacagtttagctccgatgtactacagaggggcgcaggcagctatagtggtgtacgatataaccaatcaagatacgttcggcagagcgaaaacgtgggtgaaggagctccagaggcaggccagtccgacgattgtgatagccctagccggtaataagcaggatttggctaacaagcggatggtggagtacgaggaggcgcaaacgtacgccgatgaaaatggtttgctgttcatggaaacatcggcgaaaacggcgatgaacgttaacgatatatttttagcaatagctaagaaactgcccaaaaatgaacaaacatctggtcaagggggcagcgcccaaggcaggcgactggcagaaggagatgcgggcgccaaggccccaggaaactgctgcaagtga

SEQ ID NO: 458 - DNA, 549 bp, Artificial Sequence
  Phyllotreta armoraciae
atgggtaatgtgtttgctaatttatttaaaggcctcttcggcaaaaaggaaatgaggatattgatggtaggtttagatgctgctggtaaaaccacaattttatataaactaaaattaggagaaattgtaacaaccatcccaactattggttttaatgtcgagactgtagaatataagaatatcagcttcaccgtgtgggatgtcggtggtcaggataaaattaggccattgtggagacactattttcaaaatacccagggcctaatctttgtagtggacagcaacgacagggaacgtatcaccgaggccaaagacgagctgatgcgtatgctggccgaagacgagctcagggacgccgttctgctgatattcgccaacaagcaggatttgccgaacgctatgaacgccgccgaaatcaccgataagctcggactacattcgttgcgcaaccgtaactggtacatacaggccacgtgcgccaccagcggagacggtctatacgaaggtctggattggttgtccaatcagctgaagaatgccaatcgttag

SEQ ID NO: 459 - DNA, 4607 bp, Artificial Sequence
  Phyllotreta armoraciae
acagacattcctctctgaacggttgccagatcatcaactaccgcacggacccgaagcaaaactggctgctgttggtgggcatcagcgcgcagcagtcgcgcgtcgtcggcgccatgcaattgtactcggtcgagcggaagtgctcgcagccgatcgaaggccacgccgcctcgttcgccacgttcaaaatggagggcaacccggagccgtcgacgctcttctgcttcgccgtcaggacgctgcagggcggcaagctgcacatcatcgaggtgggccagaacccggccggcaaccagccgtttcccaagaagtccgtggacgttttcttcccgcccgaggcgcagaacgacttcccggtggccatgcaggtctccaccaagtacgacgttatttacttgatcaccaagtacggttacattcacatgtacgacatcgagagcgggacttgcatatacatgaaccggatttctagcgatacgatttttgtaacggctcctcacgaatctaccggtggtatcatcggtgttaatagaagaggtcaagttttatcggtatctgtcgatgaggaaagcattattagatacattaatacagtcttgcataacgctgatctagctctacgtttagctactagaaacaatctcgctggtgctgaagacttatttgtcagtaaattccagatgctttttcaaaacgggcaatacgccgaagccgctaaagtcgctgccaacgctcctaaaggaatcctcaggacgccagctacaatccaaatgttccagcaagttcctactcaacccggccaaaacagccccctgctacaatactttggtatacttctcgatcaagggcaacttaatagatatgagtcattggaattgtgcaaaccggtcttgcttcaaggacgcaaacagctcttagaaaaatggctgaaagaagagaaattggagtgttcggaggaattgggtgatctggtgaaacaggccgatcccactctggccttgtccgtgtaccttagagcaaacgttccggccaaggtgattcagagcttcgccgaaaccgggcaattccaaaagatcgtcctgtacgctaaaaaagtatcctacacgcccgattacgtgttccttttgcgacaagtcatgcgtaccaaccccgatcaaggtgctgctttcgccggaatgttggtagccgacgaagagcctctagccgatatcaatcaaatcgtcgatatcttcatggaacagaacatggtgcaacagtgtacagcctttctgctcgacgctttgaagaacaacagacccaccgaagggcacttgcaaacaagattgctggagatgaatttgatgtcagcgcctcaggtggccgacgcgattctcggcaacaacatgttcacgcactacgatcgagcccacgtcgctcagctctgcgagaaagcaggtcttttgcaaagggccctcgagcactacaccgatttgtacgacatcaaacgggccgtggtccacactcacctgttgccggccgattggttggtgaatttcttcggaacgttgagcgtcgaagacagcttggaatgcctcaaagcgatgctgaccgctaacatcagacaaaacctgcagatttgcgtgcaaatcgccaccaaataccacgaacagctcaccactaaggctctcatcgatttgttcgagagcttcaagagttacgaaggtttgttttatttcctcggctcgatcgttaacttctctcaagaccaggaagtccactttaaatacatacaggctgcgtgcaaaacgggccaaatcaaagaagtcgaacgcatctgtcgcgaatcgaattgctacaatgccgagcgagtgaagaatttcctaaaagaagctaaactaaccgatcaattgccgcttattatcgtttgcgatcgattcgatttcgttcacgatttagtcttgtacctctacaggaactcgttgcagaagtacattgaaatttacgtgcagaaagtcaatcccagtcggttacccgtggtcgtgggcgggcttttggacgtcgattgttccgaagacatcattaaaaatctaattttggtagttagaggacaattctcgaccgacgaattagtcgaagaagtcgaaaagcgaaacagattgaaactgctgttgccttggttggagagccgtgttcacgaaggatgcgtcgagcctgccactcacaacgctctggcgaaaatttacatagattccaacaacaacgccgaacggttcttgaaagaaaaccaatggtacgattctcgcgttgtgggtcgttactgcgaaaaacgcgatcctcacctggcttgcgtcgcatacgaacgaggccaatgcgacagagaattgatcgcggtgtgcaatgaaaactccctgttcaagtctgaggctcgttacttggtgcgcaggcgcgacggcgaattgtgggctgaagtacttcaagaagcaaacccgtacagacgtcagttgatcgatcaagtagttcaaacggcgcttagcgagactcaggatcccgaagatatttctgtaaccgtaaaagctttcatgacagctgacttaccgaacgaattgatcgaattgctggagaaaatcgttttggataactctgtgttctctgagcacagaaatcttcagaatttacttattcttaccgcaatcaaagccgatgctactagagttatggattacattaaccgtttagacaactacgacgctcctgatatagcgaatatcgctataaacaatcatttgtacgaggaagctttcgccatcttcaaaaagttcgatgtcaacacttctgcgatccaagtgctcatcgaacaagtcaacaacttggaccgagcttacgaatttgctgaacgttgtaatgaaccggccgtgtggagccagctcgccaaggcccaactcaaccagggtttggtcaaggaagccatcgattcgtacatcaaagcggacgatccttcggcttacatcgacgtggtggagaccgcttcgaagaacaacagctgggaggatctggtgcgctacctgcaaatggccaggaagaaggccagagagagctacatcgaatccgagctgatctactcgtacgccaagaccggccggttggccgatttggaagagttcatcagcggtcccaatcacgctgacatccagaaaatcggcgacagatgcttcgatgataaaatgtacgacgcggccaagttgttgtacaacaacgtttcgaatttcgctcgactggccataacgctggtgcatctgaaggagtttcaaggggcggtggacagcgcccgcaaggctaacagcaccaggacgtggaaggaggtttgctttgcttgcgtagatgccgaggagttcagattggcccaaatgtgcggcatgcacatcgtcgtgcacgccgacgaattgcaggacttgataaactattatcaagacagaggttacttcgaagagttgatcggtctgttggaggctgccctggggttggagagggcccacatggggatgttcaccgaactggctatattgtattcgaaatacaagccggctaggatgcgtgaacatctcgaattgttctggtcgcgcgttaatatccccaaagtgcttagagcagccgaacaggcgcatttgtgggccgaattggtgttcctgttcgacaaatacgaagagtacgataacgccgtgctggccatgatggcgcatcctactgaagcgtggcgcgaggggcacttcaaagacatcatcacgaaagtcgcgaatatcgaattgtattacaaggcgatccaattttatctcgatttcaagccgctgttgttgaacgaccttctgctggtgctggctccgagaatggatcacacgagggccgtggctttcttcgccaaaaccagccacctgcagctggtcaaatcctacttacgatctgtccaaaatttgaacaataaagcgatcaacgaggctctcaattctctgcttatagaggaagaggacttccaggggctcagaacgtccatagacgcgttcgataacttcgataacataggtttagcccagagattagaaaagcacgaattaaccgaatttagacgcatcgccgcttatctttacaaaggaaacaaccggtggaaacagagcgtggagttgtgcaagaaagaccggctgttcagagacgccatggaatatacatcggagtctagaaaccaggaattggccgaggaactgttggcttggttcttggacagaaaggcgtatgactgcttctctgcttgcttataccactgttacgatctgctccgaccggacgtcattctggaactggcttggaagcacaacataatggactttgcgatgccgttcctgatccaggtgaccagggaattgacctcgaaagtcgagaaattggagcaatcggacgctcaaagacagagcgaggcggcggaggagacgaacaagccgatcatgatgcccgaaccccaacttatgttgactgcaggtcctggcatgggtattccgcaacagccatacatgcctcaacaaacgtacgcccaagtgggatatgcaccgcaaatggcctaccaaggttacccgggcatgtaa

SEQ ID NO: 460 - DNA, 3672 bp, Artificial Sequence
  Phyllotreta armoraciae
atgttgaccaagttcgaaaccaaatcagcaagggtaaagggactgtctttccatcccaaaaggccatggattttagccagtttacacaacgggtgcatccaattatgggactatcgaatgtgcacgcttttggagaagttcgacgagcacgacggacccgtaagaggcatatgtttccacaatcaacagcccctattcgtatcaggtggcgacgattacaaaataaaagtatggaattacaagcagaaacgttgcattttcactctgctcgggcatttggattacattcgtacgaccatgttccaccacgaatatccctggatcgtgtcagcatccgacgaccagaccatcagaatatggaactggcaatcgagaacgtgcatttgcgttttaaccggccacaatcactacgttatgtgcgctacttttcatccgagtgaggatctactgttatctgcatcgttggattctaccgttagagtttgggatatttctggactgcgtaaaaagaacgtttcacccggtccctcgggcctcgaagatcacctcaaaaatcccggtgctaccgagctattcggtcaagccgatgcagtcgtaaagcacgttttagaaggacacgatcgaggagtgaattgggcatcatttcaccccttcctacctctaatagcttccggagccgatgacaggcaaataaagctgtggaggatgaacgattcgaaagcttgggaagtcgacacgtgcagaggccattacaacaatgtgtcttgcgtgttgttccatccgagacaggagctgattttatcgaacggcgaggataggagtataagggtgtgggacatgtcaaagaggacttgcttgcatacgtttagaagggaacacgagcgattttgggtcatgacgagccacccgaatttgaatttattcgccgctggtcacgacggcggcatggtaatatttaaattggaacgagaacgaccggcttacacggtgcacggcaacctgctgtattacgtcaaagagaagtatttgagaaaactcgattttacaacgtccaaggatgttcccgttattcaaatcagaggtggtggtaaaatcccagtctacagaatgtcctttaatcctgccgaaaacgctgttttactatccactcgcacttctaatctggataacagcacttacgatttgtacatgattcccaaggatcaggaacgggacgatcacgtgcctgaagccgaaagcaagagatcttcgggtcttaccgccttgtgggtagccagaaatcgatttgctgtgctcgacaggactcaccaattgatcattaaaaatctgaaaaacgaagtaacgaaaaaagtccaaacgcccacttgcgatgaagtcttttacgccggaaccggcatgttgttgttgagagattccgaacacgttacgttgttcgatgtccaacagaagaggactttggctcaagtgaaaattagcaagtgcagatacgtcgtgtggtcttcggatatgtcgcatctagctcttctatctaaacataatgtgacgatttgcaacagaaaattggatgttctgtgttcgttgcacgagaatactagagttaagtcgggtgcttgggacgatagcggagtctttatttacactacaagtaaccatattaagtacacattgaaaaatggtgatcacggcattataagaaccctcgatcttcccatttacataacgagagtaaaaggtagtcaggtgttctgtttggacagggaatgcaagcctcgcctgttggtaatcgatcccactgaatacaaattcaaactcgcgttgatcaatcacaagtacgaagaagtcttgtacatggtcagaaattctcgattggtaggccaaagtattatatcttacttgcaacagaaaggatatccagaagtagctttgcattttgttaaggatgacaaaactaggtttgctctggctttggaatgcgggaacatcgaaattgctttggaagcagcgaaagctctaaatgataaaaattgttgggatcaattggcacaagccgctttgtggcaaggcaatcatcagatcgtagaaatgtgctatcaacgaacgaaaagtttcgaaaaactatccttcctctacctaatcaccggcaacttggaaaaactgagaaaaatgatgaaaatcgctgaaattagaaaagccagatcgtcccaataccacgctgctttgctcttaggcgatctcgaagagcgcgtaaaactgctcaaagcttccaatcaactatctctagcgtatttaaccgctgccacgcacggcatgcgagaggaagccgaacaactcaaagaacaaatcggcgacgataaaaaactgcccgacgtcgatcccaaagcaaagttcttgaaaccccctccgcccattcaacaagccgagtccaattggcctttgctcacagtcagcaggagtttcttcgagaataccgcagctgccgcgaccgcttcggccaacatgaaatctctgatggccgagcccgttacggacgtgggaatggaagacgcccagggctggggcgacgacgacgaactagaactggatcctgacgagaagaaggccgaagtcgccgccgcaggaggcggtgatggcgaaggcggctgggacgtggaggacgaaggtttggaaatccccgatctcggaccgaccgcaaccgtagaagcagaaggcaatttcgtgcatttacccactcaagggccgtctccgcttattgtttggacgaagaattcgcagttggtggccgatcatgtggctgcgggttcattcgaatcggccgccaggttgcttcacgatcaattaggagtggtgaatttcaggcctttcgagagtttgtttttgaatttgtacagtacttcgaagacggtgtcttcttggcagcaaaacgtaccgccttcgttcagttacccgttgaggaattggaaggaaggaaacgttaagaatcagctgcccgcttcgggagtgaaattgaacgatttagtagcaaaattgcagatttgctatcaattgacgaccggtgggaaattcacggaagccatcgagaaattgcaaactctgctgttgtcagttacgcttctcgtggttgataacaaacaggaaatttccgaggctcagcagttactcagaatagccagcgagtatatttgcggtttgcaaatggaaactttgaggaaaactctaccgaaaacttcggccgaagagcagaaacgccagtgtgaaatggccgcgtatttcacccattgtaaattacagccgatacatcaaatcctcacgctcagaacggcgctcaacatgtttttcaagctcaaaaactacaaaacggccgcttctttcgccaagaggctgttggaattgggcccgagaccggaggtggcccagcaagcgaggaaaatattgcaagcgtgcgattcgaatctcaccgatgatttccaattgcactatgacgagcacaatccgttcaacttgtgcgggcactcctacacgcccatctacaggggcaaggccgaagagaaatgtccattgtgcggtacttcctatttgcctaaatataaaggggtgttgtgtaatatttgcaaagtggcggaagttggaaaggataccattggattgaggattagcacgcatcagtttaggtaa

SEQ ID NO: 461 - DNA, 552 bp, Artificial Sequence
  Phyllotreta armoraciae
atgggccgatacgctcgcgaacccgacaatgcggcgaagtcttgcaaagccagaggctccaaccttagagtccacttcaagaatacatgcgagaccgcgaacgccataaggaagatgcccctcaaaagggcagtagcctatttgaagaatgtcgtcattcaaaaagagtgtattccatttaggaggtttaacggaggagttggtcgttgtgctcaagccaagcaatttggcacgacacagggtagatggcccaagaagtccgcggaatttctgttacagctcctcaggaacgccgagagcaacgcagattacagtgggcttgatgtcgataggctagttgtagaacacattcaagttaacagagctgcttgtttgagacgtcgtacgtacagggctcacggtagaatcaatccgtacatgtcgtctccctgtcacatcgaactctggttaaccgagggagaatcgtcacctgaagctcccaagaagagcaacaaaaagaaggcaacggagaagaagagacccaagtcatcagttgctgcagtagcgcattga

SEQ ID NO: 462 - DNA, 315 bp, Artificial Sequence
  Phyllotreta armoraciae
atggtgaacgttccgaaacaaaggcgtacattttgcaaaaaatgcaaagtccacaagctgcacaaagtgacgcagtacaaaaaatccaaagaacgtcacgcttcgcagggtagaagacgttacgacagaaaacagcagggtttcggtggtcagactaaacctattttcaggaagaaggcaaaaaccaccaagaaaatcgtgttgaggatggagtgtgctgattgcaagtacaggatgcagttccccttgaagagatgcaagcacttcgaacttggaggtgacaagaagcgcaagggccagatgatccagttctag

SEQ ID NO: 463 - DNA, 2340 bp, Artificial Sequence
  Phyllotreta cruciferae
atgactacttacgaggaatatattcaacaaaatgaggaccgagatggtatccgttttacgtggaacgtgtggccctccagcaggattgaagccacccgcttggtggtaccattagcctgcctctaccagcctatcaaagaacgagtagatcttcctccaatacaatacgatccagtattgtgcacaaggaacaactgcagggctattttaaatccactgtgtcaagtcgactatcggagtaaattatgggtttgcaacttttgcttccagagaaatccatttcctcaacaatacgcagctatctccgaacaacatcagcctgctgaattaatgcctatgttctcgactattgagtacacaataaacagagttcaatgtttacctcccatattcttatatgttgtcgatacttgcatggatgaagaagaattgggttctcttaaggactcattgcaaatgtcgttgagtttgttgccgcagaacgctttgattggcctgattacatttggaaaaatggttcaagttcacgaattaggcaccgaaggtgtgagcaaatcgtacgtattccgaggaactaaggatctaacggctaaacaggttcaggaaatgttgggtattggtaaagtctcgatggctcctcacaatcctcaacaacaaccgcaacaacctggacaacctatgagaccgggacaacctcaatctgcgcctgttccacctggtagcagattcctgcaacctatttcaaaatgtgatatgaatctaacggatttaataggagaacaacagaaagatccttggcctgtacatcaaggtaaaaggccactcagatgcactggtgttgcattatcgattgctatcggtttattggagtgtacctatgcaaatacgggagctagggttatgctttttgttgggggttcttgctcacaaggtcctggtcaagttttgaatgacgatttgaaacagcctattaggtcccatcatgatatccaaaaagataatgcaaaatatatgaagaaagctattaagcattatgatactttagcgatgagagcagcgactaatggtcattgcattgatatttattcctgtgcacttgatcaaactggtttaatggaaatgaaacaatgtgctaattcaacaggtggtcacatggtgatgggagattcttttaattcatcgctctttaaacaaacattccaaagggtgttcacacgagatcagaaaaacgatttgaaaatggcttttaacggaacattagaagtgaaatgttctcgagaattaaaagtgcaaggaggaattggatcctgtgtatcattaaacgtcaaaagtcaactggtctctgacacagaaatcggcatgggcaacactgtacaatggaaaatgtgtacgcttactccaagcactacgatggccttgttcttcgaagtcgtcaatcagcattctgcgccaattccgcaaggaggaagaggttgcatacaatttattactcaatatcaacactcaagtggtcaaagaaggattagagtgacaacagtggctcgaaactgggctgatgccactactaatatccaccacatcagcgctggttttgatcaggaagcagcagctgtaattatggccagaatggctgtttatagagctgaatcagatgagagtcccgacgttctgagatgggtcgatagaatgctgattcgattgtgtcaaaaattcggagaatacaacaaagacgatgctggttcattcagattaggccaaaactttagcctctatccgcaattcatgtaccatctaaggaggtctcagttcctgcaagttttcaataattctcctgatgaaacgtcgttctatagacatatgttgatgagagaagatcttactcaatcattgatcatgattcaaccaattttgtacagttacagtttcaacggccctccggagcctgttctattagatacgagttccatacagcccgatagaatactgcttatggacacgtttttccaaattttgatattccacggagagactatagctcagtggagaaatttgaaataccaagacatgcccgaatacgagaactttagacaattactgcaagcacctattgatgatgctcaagagatattacaaacaaggttccccatgccgagatatatcgatacagaacaaggaggatcgcaggctagatttttattgtccaaagtcaatccgagtcagactcacaataacatgtattcatatggaggggacgctggcgctccagttttaacagacgatgtatcacttcaagtatttatggatcatttgaaaaaattggcagtttcgtccacggcttaa

SEQ ID NO: 464 - DNA, 2718 bp, Artificial Sequence
  Phyllotreta cruciferae
atgccacttcggttagacatcaaaaggaagctaacagcccgttctgaccgggtgaaatgcgtcgacctccatcccacggagccctggatgctctgttcactttacagcggaaacataaacgtatggaatcatgaaaatcagcagctcgttaaaacgttcgaggtatgcgatctgccagtgagagctgcgaaattcgttccgaggaaaaattggattgttagtggatctgatgacatgcagattagagtttttaattacaatacattggatcgtgtgcatgcttttgaagcccattctgattatgtccgatccatcgttgttcatcctacacagccttatatcttaacaagtagcgatgatatgctaattaagctgtggaactgggagaaagcatgggcatgccagcaagtgttcgaaggccacgttcactacatcatgcaaatttccatcaatcccaaagacaacaacacattcgccagcgcctcattggaccgaacgataaaagtctggcaattgggcgcttctacggcgaatttcacgctcgagggccacgagaagggcgtcaattgcgtcgattactatcacggtggcgacaaaccctacctgatatccggcgctgacgacagattggtcaaaatctgggattatcagaacaaaacgtgcgttcaaacgttggaaggacacggacaaaacgtgaccgccgtttgtttccatccggaattgccgatcgccctcaccggcagcgaagacggcacggtgagagtttggcacgcgaacacgcaccgattagagagcagtttgaactatggcttcgaacgggtgtggaccatattctgcttgaagggctccaataacgtggccctcggctatgacgagggtagcattctcgttaaagtcggtagagaagagccggccgtgagcatggacgcgagcggagggaaaatcatatgggcgaggcattcggagttacagcaggccaatctgaaagccttacccgaaggagctgaaataagagacggcgaacgtttaccagtctccatcaaagacatgggcgcttgtgacatttaccctcaaactattcagcataatcccaacgggcgtttcgtggtcgtttgcggcgatggagaatacatcatttacacggccatggcgctgaggaacaaagcgttcggtagcgcgcaggagttcgtttgggcgcaggattcgagcgaatacgccatcagagagtccggatctaccatcagaatattcaagaacttcaaagagaagaagaatttcaaatcggactttggagccgaaggcatctatggtggttatctgttgggtgtaaaatctgtatccggattggccttctacgattgggaaactctggatttagttagaaggatcgaaatacaacctcgctcgatatactggtctgatagcggcaaactagtttgtttagccaccgaagatagttatttcatactctcttatgatgctgaagaagttcaaagagcaaaggataataaccaggtggccgatgatggagtggagtccgccttcaatctactgggtgaagtgaacgagtctgttcgtacaggtctctgggtaggagattgcttcatttacacaaacgccgtaaaccgtatcaattacttcgtcggaggtgaattggtgaccatcgcacatctggatggcccattgtacgtactgggctatgttccaaaggatgataggctctatttagtcgacaaagaattaagagtggtcagctatcagctgctcctttcggtcttagagtaccaaactgccgttatgagaagagacttctcgacagctgacagagtgttgccttcgattcctaaggaacaccgaacgagagtggctcatttcttggaaaagcaaggcttcaaacaacaagctctggccgtgagcactgatcctgaacacaggttcgaactggctgtagctttggaggatttgaataccgccaagatgctggctcaggaagctaacaatccgcagaaatggagccagctggccgatttagcggcgtccacgaataatctcgtgttggccaaagagtgcatgcagaaagcccaagattacggtggattattgctcttggctaccagttctggagatgacgaggtagtgaggacattaggcgaagccacagaagccgagggcaagcataacttggcattcttatcccacttattaatcggggacttgaacaaatgtctggacattttgataagcaccggtaggcttccagaagctgcgtttttcgcaaggtcgtatcttcccgataaaatatccgaagtagtggaactttggagggcgcaattgtcggttaccaatcagaaagccggtcaaagtttggcggatcctaaagactacgacaacctgtttcccggtcttcaggaagccattgtggcgcagaaatatttggaagagaaccactcgggattcataccggctgctatggccgccaccgttactccaaatcaagaaaggaacgtaatagcagaggtggaagccaaggtaaaaggtgccgatggtgtgttgccgagcacgtcgcaaccttcggttaaggcgccaagcgaacagatgaagaaactctcgattactcaagatgaggacgatttggatttggaccttgatggagtgaacattgatgaaaatatagatacaacggatatcaatatagatgatgacttgttaagtgattga

SEQ ID NO: 465 - DNA, 2824 bp, Artificial Sequence
  Phyllotreta cruciferae
atgaccgcggtcgaacagccctgttacactttaattaatttaccgaccgattcggagccttacaatgaaatgcaattgaaaatggatctcgagaagggcgaagtgaaagtaaagataagggctttggaaagaatcattcacatgatactggcaggcgagaggttgcccaatggattcctgatgacaatcatacgaaacgttctgccccttcaagatcacctggccaagaagcttttgctaattttttgggaaatcgtgccgaaaaccacccccgatggtaaattactgcaggaaatgatcctagtttgcgacgcctacagaaaggacctgcaacaccccaacgaattcctgcgaggatccacattgaggttcttatgcaagctgaaggagcccgagctattggagcccttgatgcccagcattcgaatttgcctggagcacaggcacagctatgtccgaaggaacgccgttctggccatttttacgatatacaagaatttcgaatttctcattccggacgcccctgaattgatttccacttacctagatggcgaacaagacatgtcttgcaaaagaaacgctttcctcatgctgttgcatgccgatcaagatcgagcactcacttacctatccaattgcttagatcaagtggcatctttcggggatattctgcagttggtgatcgtcgaattgatatacaaagtgtgccactctaacccaaccgagagatccaggttcattcgatgcatatacaatctgttaaattcgagcagtcctgctgtgagatacgaggcggccggtactctgattactttgtccagcgccccgacggccattaaagccgccgccagttgttacattgaattgatcattaaagaaagcgacaacaatgtcaaattgatcgttttggatagattgatcgccttgaaggagcatcccagccacgagagagtcctgcaggacttggttatggatatattgagagtgctgtcggctcctgatttggaagtgcgaaagaaaacgcttaatttagcgctcgaattggtctcttcacgtaacgtcgaagaaatggtgtttgtgctgaagaaagaggtgtcgaagactgtggatagcgaacacgaggatactgggaaatacaggcaattgttagttagaacgttgcattcttgttgcatcaaattccctgatatagctgctacagtcattcctgttctgatggaatttctgtccgatagcaatgaattggcggccaccgatgtgttgctatttttgagggaggccatacagaaattcgataatttggagccgctcattatcgagaaattattagagacattcaaagacatcaaatctgtgaaagttcatcgtgctgctctttggatattaggtgaatacgccacgtctactgcagacatagaagctgtaatcaaagagatcgttcaaacattgggcgaatgccctctgttggagtctgagcaaaagattatatcgggtagtacagatgaaagtgcgccagctcatgcaccagccggggccaccactttggttacttcagatggaacttacgccactcaatctgctttcaacgtggccagtaaatctacaaaagagaagagacctcctttgaggcaatacctcatggatggagattttttcatagccgcttctttggcctctactttgaccaaattggctttaagatatggtgaaaacgtttccgcttccgataggaataaattcgacgctgaagttatgcttattatggctggcattttgcatttaggcaaatcaggtttgccggtaaaacagataactaacgacgacaacgaccacattctcttctgcctgcgcgtgctatccgatcgcacggagcccgtcgtccaagtattctcgagcctgtgccgcaacgccctcaacgacatgctgctggccaaggaaaccgaagaggcgaccgatcagaaatcgcgagagaaatcccgagccgccgtccaaaccgacgacgccatcaccttcgtgcaactggagtccgaccgaagcggcgagctcggcgaaaacgtcttcgaaacctccctgtcgcaggccctaatgggcggcaagacggggcaatcggactccaccatcggctcgagtaaattgaacaagatcgcccagttgacgggtttctcggatcctgtttactccgaagcgtatgtgcacgttaatcagtacgatatcgtgctggacgtgttggtggtgaaccaaacgagcgacacgctgcagaattgtactctggagttggcgactctgggcgatttgaagttggtggagaagcctcagccggtcgttctggcgccgaaggatttctgcaatatcaaggctaacgtgaaagtggcctcgaccgagaatggtatcatattcggtaacatcgtgtacgacgtgacaggcgccgcttcggacaggaatgtagtcgttttgaacgacatacacatcgatattatggattacattgttccggcatcgtgcaccgattcagagtttatgaggatgtgggctgaattcgaatgggagaataaggtgaccgtcaatacgccgctgacggatctcaacgagtacctggagcatctgctgaagagtactaacatgaagtgcctgacatcagagaaggcgctcggcgggcagtgcggcttcatggcggccaatatgtacgcgaaatcgatcttcggggaggacgcactggcgaatttgagcatcgagaagccgttcaacaagccggacgcgcccgtcgccggtcacattagaattcgggccaaaagtcagggtatggctttgagtttgggcgacaaaa

SEQ ID NO: 466 - DNA, 1521 bp, Artificial Sequence
  Phyllotreta cruciferae
  misc_feature (627)..(723): n is a, c, g, or t
atgcagatcttcgtgaagaccttgactgggaaaacaattacattagaagtcgaaccttctgacaccatcgagaatgtcaaagctaaaattcaggacaaagaaggtatcccaccagaccaacagagattgatcttcgctggtaaacaattggaagatggccgtactctttctgattacaacatccagaaagaatctactcttcacttggttttgagacttcgtggtggtatgcaaatcttcgtaaaaactctcaccggcaagaccatcacccttgaagtcgagccatctgacactattgagaatgttaaagccaagatccaggacaaagaaggtatcccaccagaccaacaaagattgatcttcgctggaaagcaattggaagatggccgtactctttctgattacaacatccagaaggaatcgacccttcacttggttttgagacttcgtggtggcatgcagatcttcgtaaaaactcttactggaaaaaccatcacccttgaagtcgagccatccgacactattgagaatgttaaagccaagatccaggacaaagaaggtatcccaccagaccaacaaagattgatcttcgccggaaagcaattggaagatggccgtactctttcnnnnnnnnnnnnnnnnnnnnnnnnnnnnnnnnnnnnnnnnnnnnnnnnnnnnnnnnnnnnnnnnnnnnnnnnnnnnnnnnnnnnnnnnnnnnnnnnncagagattgatcttcgcaggaaaacaattagaagatggccgtactctttccgactacaatatccagaaggaatctacccttcacttggtacttagacttcgtggtggtatgcagatcttcgtaaaaactctcactggcaagaccatcacccttgaagtcgagccatctgacaccattgagaatgttaaggctaaaattcaggacaaagaaggtatcccaccagaccaacagagattgatcttcgcaggaaaacaattagaagatggccgtactctttccgactacaatatccagaaggaatctactcttcacttggtacttagacttcgtggtggtatgcagatcttcgtaaaaactcttactggaaagaccatcacccttgaagtcgagccatctgacaccattgagaatgttaaggctaaaatccaggacaaagaaggtatcccaccagaccaacagagattgatcttcgccggaaaacaacttgaagatggccgtactctttccgactacaatatccagaaggaatctaccctccacttggtacttagacttcgtggtggtatgcagatcttcgtaaaaactcttactggcaagaccatcacccttgaagtcgaaccatccgacaccatcgagaatgttaaagccaagatccaggacaaagagggaattcccccagaccagcaaagattgatcttcgcaggaaaacaattagaagatggccgtactctttccgattacaacatccagaaagaatctacattgcatttggtactccgtcttagaggaggacagtaa

SEQ ID NO: 467 - DNA, 603 bp, Artificial Sequence
  Phyllotreta cruciferae
atggaatgcctactcggtatcaaattcgacgatttcgttttagttgctgccgatatgactgcggcccaaagcataattgttatgaaaacagacgaaaataagctgtttaaattgtctaacaagcttgttatggctgtatccggagaatccggcgatactacccaatttgccgagtacattgctaagaatatccagttgtataaaatgagaaatacctacgaacttagcccatcggaagcagcatcctttactcgtaggaatctcgctgatgctcttagaagcagaagtccttatcacgtaaatttgttgctggctggatacgacgagaaagaaggcccccagttatactacatggactacttggcgtcgaccatcaaagttaattacgctgctcacggctacggagggttcttctcgttgtctataatggacagaaactacgtcaaatcgctcagtagagaagaaggctacgagttgttgaaaaaatgcgtgaaagaagttcaaaaaagattaatcatcaatttacctaactttaaggtacagtgtgtaggcagggatggtataacagacctgcccgacatcaccgccaaggatttggcttaa

SEQ ID NO: 468 - DNA, 484 bp, Artificial Sequence
  Phyllotreta cruciferae
atggaagaggcctccaaggcaaagaaggccaagaaaggtttcatgacccccgaaagaaagaagaaacttaggttactgttgagaaagaaagccgccgaggaattaaagaaggaacaggaaaggaaagcggccgagaggagacgcatcatcgaagaacgctgtggaaagcccaaactgatcgatgacgccaatgaagaacaacttaagagtatttccaaagcgtatcacgagagaatttgcaagctggaagaccagaaattcgatttggaatatctagtcaaaaagaaagacatggagatcgcggaattgaacagccaagtaaacgacctcagaggaaaattcgtgaaaccgacgttgaagaaggtgtcgaaatacgagaacaaattcgccaagttgcagaagaaggccgccgaatttaacttccgcaaccagctcaaagtggtcaagaagaaggagttcaccttagaagaagaagacaaagaga

SEQ ID NO: 469 - DNA, 795 bp, Artificial Sequence
  Phyllotreta cruciferae
atggtcgagaagaagaagaccgaaactgcgcctgcagaggcacccaaaaaggtgcacaaacctggaaaacctagaaattatgatttaggaaatggcgttatgaggttttcaagaaccaagatgttccacaagaaggctttatataaatttattggcaaaaaagttaaggctaccaagaagccgcaaaagcctcacgttatcgaaaagccaattaatggagaaaagaacggaggaaagagattcgtcttagtcaagaaacgtagggcgtactatcctactcaagacaagataaagccgaggcctgcaaagaaatccttctgtcagcacaaacgctcgctcagaactaccatcactcctggtaccgttcttattttgttggctggttcccacaagggaaagagggtcgttttcctgaaacaactttactctggccttttacttgtcaccggtccgttttctattaatgcctgtccgttgagacgtattagtcaacgatacgttattgcgacatcgaccaaaattgatgttagcggtattaaagttcccgacaactttgacgatgactatttcgcgaggaaacgcgtcaagagggcaaagaaagaagaaggtgatattttccaaaccaagaaagaggtttacaaagtaagtgaggaaaggaaaaaggaccagaaggaagtcgattcacaggtgatggcagcgatcaaaaaacatcctgatcgtaaagttctgcaatcctatttatcatctatgtggggtttgaggtcttctcaatatcctcacagaatgaacttttag

SEQ ID NO: 470 - DNA, 678 bp, Artificial Sequence
  Phyllotreta cruciferae
atgccgcctgtaatgactgattttatgccacaagatggttcgaacgattggagggacgctgcccacagtaccggaacttccattatggcatcagaattcgacggtggagtcgtcataggagccgattcacgtacaaccaccggggcctacatcgcaaacagagtctctgacaaactaacgagagtcactgatcacatctactgctgccggtcgggctccgctgccgatacggaggccatcgcagatatcgtaggataccatttgaacttccacgggatggaattaggggaagagcccagcgtagaagtaggagctgctatattcaaggagctgtgctacaattacagggactccttgatggccggtatactcgtagcaggttgggataagaagaaagggggccagatttattccatacccattggtggaatgtgcgtgagacaggaggtgtccatcggggggtccggatcgagctacgtgtacggctacatggacgccaattacaaaccgaaaatgtctaaagaagattgcgttaaattcgttactaatactttggctctcgcaatgtctagagatggttcttctggcggtgtaatcagattaggtatcatcacggaggaaggtatagaacgtagggttgtattaggtaacgaattgcccaaattttacgaaggctaa

SEQ ID NO: 471 - DNA, 747 bp, Artificial Sequence
  Phyllotreta cruciferae
atggcagggaaaggagacggcaaaggcgaggcgagtatactcaaattggaaaatcagattgccgtcatcaaatacgtgatactctttgccaacgtcttgcaatgggccctcggcggcgcaatctttgccctttgcctttggctgaggttcgaggagggcatccaagaatggctgcagaaattggattccgaacaattttacaacggagtttatgtacttatagtcgcttcgctgatcgtcatgattgtgtcctttctgggatgtattagtgccctgcaggagaatacggtgacccttttggcctacatcggcacgcaagtgctgagcttcatattcggtttagccgggtcggctgttcttctggataacagcgccagagattcccacttccagccgaggattcgggagagcatgcgacgtcttatcatgaatgctcatcacgagccatccagagtaacgctcgccatgattcaggaaaatatcggctgctgcggtgctgacggagcagaagattacttggcgctgcaacagccattaccgagccaatgcagggacaccgtcaccggtaatccctatttccacggatgcgtcgacgagctcacgtggttcttcgaggagaagtgcgcctggatagccgcattggccatgtgcatttgcttcttcaacgtttttaacatcgtgctttccactgtgctgatacaggcgttgaagaaggaagaggaacaggcggattcttacaggaattag

SEQ ID NO: 472 - DNA, 3021 bp, Artificial Sequence
  Phyllotreta cruciferae
atgaatattacttcggctgcggggattatatcccttttagaagaaccaagaccagaacttaaagtattcgcgttaagaaaactagattcaatagtcgatgaattctggccagaaatttcagaagctattgaaaagatagaaattctgcacgaagacaaagtgttccaacaacaccagttagctgctttagttgctagtaaagtgtactatcatctgggtgcatttgaagactcattaacgtacgctttgggagctggtgatctcttcgacgtaaatgctagaacagaatatgttgaaacaacacttgcaaaatgcatcgacttctatacacaacaacgcatcgccttagcagaaggtgcaaccgatgcgaaacctattgattcgagactcgaagcgattgtaaaccgaatgttccaacgttgtttggatgacgggcaaaaccgccaggctatggggctcgctttagagaccaggagaatggatatcttcgaattatctatcacacaagctgaggatattattagtatgctcacctacgctttccaagtggcgatgagcctaattcagaatagggcatttcgtaacactgttttaagatcgttggttggcttgtatcgcggtttgactacaccagattacgttaacatgtgtcaatgtctaattttcttggacgatgcactaccagtcgcagaaatattggataagttagtgtctggtaaagaagagtctgagttgatggcttaccaaatagcttttgatctttatgagtcagcaacgcaacagtttttggaaagagttttggttgccctaagagctactgctcccattccttcgctgttagaggaaaaggtgaaatctaaaactactgaacaatctagtagcacttccgcagaggctagcaaagatcctgttagcagtgaaactaaaagcgaggttaaaaaagaagaaaaatctattgagagtttgactgaaagtgaaaaggaacaccaaaagcgaattgaaaaattgcataccatcttatcaggcgaagtatcaatagaacttcatcttcaatttctcattagatctaaccacgccgatcttcttattctgaagcaaacgaaagaaactgttcgagtcagcatttgccacactgctacagtcatcgctaatgctttcatgcacagcggtactaccagtgaccaatttctaagggataatttggaatggctagctcgagctacgaattgggcgaaacttacagcaacagcgtctctcggtgtcatccatcgtggacatgaacaagaggctttgactctcatgcaaagctatttaccgaaggaagttgggccgagttccggatattccgaaggcggtggtttatacgctcttggtcttatccacgccaatcacggtgctaatataatcgattatcttcttggtcaattgaaagatgctcagaacgagatggttagacacggcggttgtttgggccttggtttggctgctatggggacacacaggcaagatgtatacgaacagctcaagttcaatctctatcaagatgatgctaatactggagaggccgctggaattgcgatgggtatggttatgttaggatccagtaattccaccactattatggatatggtagcgtatgcgcaagagagtcaacacgaaaaaattcttcgcggtttggctgttggtataagcttcacgatgtacggccgattagaagaagctgataccctaatacagcagcttacttctgataaggatccaatcctgagaagatccggcatgtatacattagctatggcttattgcggcacgggacacaaccaggcgattagaaaattattacacgttgcggtttctgatgtaaacgatgacgtgagaagagcggcagtcacagcgctcggtttcctgttgttcagaacccccgagcaatgtcccagcgtggtgtcccttttagcggaaagctacaacccccacgtgcgttacggggccgccatggcgctgggcatagcctgcgccggcacgggcctccgcgaggccatagccctgctcgagcccatggtcatgttcgatccggtgaacttcgtccggcagggggctctcatcgcctcagcgatgatcctcatccagcagaccgagcagacctgcccgaaggtcagcttcttcaggcagacctactcccaggtcatctccaacaagcacgaagacgtcatggcgaagttcggcgccattttggcgcaaggtataatcgatgccggtggcaggaacgtgactttatcgctgcaatccagaaccggccacactaacatgctggccgttgtcggtacattggtgttcacgcagtattggtattggttccctctgtcgcattgtctggctttagcttttaccccgacgtgcgttatagcgttgaatactcaactgaagatgcctaaattggagttcaaatcgaacgcgaaaccgagcttgtacgcctacccggcgcccatggaggaaaagaaacgcgaagaaagggagaaagtcaccaccgccgtattgagcatagctgcgaggcaaaggagaagggatcacgagaggaaacatcgcgatgagaaaatggatgtggacgaagataaagacgataagaaaaccgaaaaggaggagaaagagaagaaaaccgaagacaagaaagaggagaaaaagtccgatgataagaaaaccgacgataaaaaagcggcgtcgtcgagcgacgacaaaaaagataagaaagatgataaggaggagaagaaaaaggagcccgagcctattttcgaaatcttgcaaaatcctgccaggaccatgaggcaacaactgaaagtgattacgcttaatgataactcgcaatacgttgcaatgaaggatgtttctatcggagggattatcatggttcgcaatttgaaacctggcgaagaagaattggtggaacctgtagcagcattcggtccaaagggcgatgatgaaaaggaaccagaaccaccagaaccattcgaatggaccgaggattag

SEQ ID NO: 473 - DNA, 384 bp, Artificial Sequence
  Phyllotreta cruciferae
atgcaaattttcgtaaaaactctcaccggtaaaaccattaccctcgaggtagaaccatcagacaccatcgaaaatgtcaaagctaagattcaagataaggaaggtattcctcccgaccagcagcgattgattttcgcaggtaaacaactggaggatggccgtaccctttcagattacaacatccaaaaggagtctaccctccacttggtgctccgttttagaggaggaatcatcgagccctctctgcgtcttctggcccaaaagtacaattgcgacaagatgagttgccgcaagtgttacgctagactacatcctagagctaccaattgcaggaaaaccaagtgtggacacaccaacaacttgcgccccaagaagaagctgaag

SEQ ID NO: 474 - DNA, 2640 bp, Artificial Sequence
  Phyllotreta cruciferae
atgagctcttttaaaagagacaaaaaggaggaagaagacggagttggaaacatatttcaaaatatcgaaaaaaccactgttttacaagaagctcgagtgtttaacgaaacatcagtgaatccaagaaaatgcaccctaattctcaccaaattgctttacctactaaatcagggggaagctttaaacgtaaaagaagcaacagacgttttcttcgcaatgaccaaactattccaatcgaaggacgtaatacttcgaagaatggtgtacctaggcatcaaagagctgagctcgaccgcagacgatgtaatcatagtaacttcgagcctcaccaaagatatgaccggcaaagaagacatttacagagcagctgctatacgtgctttatgcagcatcaccgatgctaccatgctacaagccatcgaacggtacatgaagcaagcaatcgtagatagaaattccgctgtcagttcagccgcattggtcagctctttgcacatgaccaaaatggcacctgaagtggtgaaaagatgggtaaacgaagcacaggaagctattaatagtgataatgtaatggtgcaatatcacgccttggggctcctataccacatcagaaaaacagataggttggctgttacaaaattaatagctaaactaaccagaactaccctgaaatctccttatgctgtttgtatgcttatcagaataatagccaagctcctcgaagaagaagattccaacaatgattttccctacttcgatttcatcgaatcttgtctaaggcacaagtctgagatggtagtttacgaagcagcccatgctatcgttaatctcaaacgtacgactagcaaagaattggccccagctgtcagtgtattacaattgttctgcggttcaccgaaggctactttgagattcgccgctgtaagaactctaaatcaagtggctatttcccacccggccgctgtgacagcttgtaatttagatttggagaacttgattactgattctaatcgatcgatcgccactcttgctatcactactttattaaaaactggtgctgaatcgtctgttgatcgtcttatgaaacaaatagcgagtttcgtatctgaaattagcgatgaattcaaagttgtggtagttcaagcgatcagagctctggctcttaaattccctcgaaagcataacactctcatgaactttttatcggctatgttaagagatgaaggcggtttggagtacaaagcttccattgcagacaccataattactataatcgaagataatcctgaagcaaaagaatcgggtttggctcatctatgcgagtttattgaagattgcgaacacgtttccttagctgttagaatattgcatctgctaggtagggaaggaccaaaaaccaaacaaccttctaggtacatccgcttcatctacaaccgcgtcatcttagagtgcccttccataagagctgccgctgtttcagccatggcacaattcggagcttcgtgtcccgatttgttagaaaacattcaagtattactagcaagatgccaaatggactcggacgatgaagttagagacagagccacttattacagcagcatactcaataagaacgataagaacttgtacaacaattatatcctggatactttacaggtatctataccatcgctggaacgctcgttgaaagagtacacgcaaagccctacgaatcaaccgttcgacataaaatcagttccattgcaagtgggcccgtctccggacgagcgcgagaagaagcacaagtccgaaggcatgttgacgtcgcaagggcccttgcggccgccgcccgtctcccgcgaggagaacttcgcggagaaactgtcggccataccgggcatccagcagctgggcccgatcttcaagagctccgaggtggtggagctgaccgaatccgagacggagtacttcgtgcgctgcatcaagcactgcttcgcccaccacgtggtcctgcagttcgattgcctgaacacgctggccgatcaattgctggaggacgtgcgggtggagctggagccgagcgaagggttcgagttgctgtcggtggtgccgtgcaagcagctgcattacaacgagaccaatcacacctacgctattttgaagttccccgacgacgatctgcctagttgcgttggtactttcggggcggtgttgaagtttatcgttaaagattgcgatcccaccactggcattcccgatagcgatgaaggttacaatgatgaatacatactcgaagacttggaaataacgttgggcgatcaaatacagagagtgagcaaggtcaattggggcgccgcttgggaatcggctgctgagggttccgtggaaaaggaggatacgtattctctcagttcgatgaatacgttggatgaagctgtgaaaaatatcgtgcagttccttggattgcaaccggccgaaagaactgataaagtgcccgaaggcaagagcacccacacgcttctactatcaggagtctttagaggaggaatcgatattttggtaagagctaaacttgctttagcggatggtgttacaatgcaactgactgtaagatcacccgatgacagcatagctgaacttattacctcttctgtaggttaa

SEQ ID NO: 475 - DNA, 1284 bp, Artificial Sequence
  Phyllotreta cruciferae
atgtcgaccttagaagacaaatcgatttgggaagacggcgaggaagcgctcggcgaggaggttttaagaatgtccactgacgttatcatcggtcatacgcgattgctggacaacgagattaaaataatgaagagcgaagtgatgcgaataaaccacgaactgcaggcgcaaaacgagaagatcaaagagaataccgagaaaataaaagtgaacaaaaccttgccttacttggtttcgaacgtaatagaactgttggacgtggatccccaagaagaggaagaggacggcgcagtagtcgatttggattctcaaagaaaagggaaatgcgctgtagttaaaacgtccacaagacagacctattttctaccagttataggactagtcgatgaggagaaattgaaaccgggtgatctagtgggagtcaacaaagactcttatctaattttggaaacattacccgcagagtacgatgccagagtcaaggctatggaagtcgacgaaaggccttctgagcagtactccgatatcggaggtttagataaacaaatacaagaacttatcgaagctgttgtactacctatgacgcataaagacaagttcgttaatttgggaattcatcctcctaaaggtgttctcctttacggccccccgggtaccggaaaaaccctcctagccagagcctgcgccgcccaaacgaaatcaactttcctcaaactggccggtcctcagttagtccagatgttcataggagacggcgccaaattagtgcgagacgccttcgccttggccaaagagaaagccccagctataatattcatcgacgagctggacgccatcggtacgaagcgattcgattcagagaaagccggcgacagggaagtccagcgcaccatgttggagctgctgaaccaattggacggcttcagctcgacatccgacatcaaagtgatagcggctacgaatcgcgtggacatcctggaccccgctctgcttcggtccggaaggttggacaggaagatcgagttcccgcatcccaacgaggaggcgagggccaggatcatgcagattcactccaggaaaatgaccgtcaacccggacgtgaacttcgaggaattggccaggtctacggacgacttcaacggggctcagtgtaaggctgtgtgcgtcgaagcgggtatgatcgctctcaggcgtaacgccacggctgtcacgcacgaggactacatggacgcgattatggaagttcaagctaagaaaaaggcgaatcttaattattacgcctaa

SEQ ID NO: 476 - DNA, 660 bp, Artificial Sequence
  Phyllotreta cruciferae
atgagtttctttagtaaaatattcggaggaaaagaaaaggatgtgggccccacgccaggcgaagccatccaaaagctcagggaaaccgaggacatgttatataaaaaacaagagtttttagaaaagaaaatagaggaatatacactagtagccaaaaaaaatgcatcaaagaataagagagtcgcgctgcaggcgctcaaaaagaaaaaacgattggaaaaaactcaattacaaatcgatggcacactcactacaatcgaaatgcaaagggaggccctcgaaggagccagcaccaacacagccgtcttagattcaatgaagaatgcagctgaagctctccaaaaagcccacaaaaacttgaatgtcgatgatgtccacgacatcatggatgacatagctgaacagcatgacattgccaacgagattactactgctattagccagccggtaggcttcgctgatgatttggacgaggatgaattagaaagcgaactagaaaagctcgaacaagaaggattagaggaagatttgctgaaagttccaggcccaactgaactacctgctgtacctacaggagctattgccaagcccgttaaacctgctgctaaaaaagtggaggatgatgatgacatgaaagaattggaagcttgggcttcataa

SEQ ID NO: 477 - DNA, 609 bp, Artificial Sequence
  Phyllotreta cruciferae
atgaatcctgagtatgattacttattcaagctgcttcttattggcgattctggcgtaggaaaatcgtgtttgctattgagatttgcggatgatacttatacggagagttatattagtactattggagtagattttaaaatcagaacaatcgacttagatggaaaaacaattaaattgcaaatttgggataccgccggtcaggaacgatttagaactataacatcgagttactacaggggagcgcacggaatcatcgtcgtgtacgattgcacagaccaggactctttcaacaacgtgaaacaatggttggaggaaatcgaccgttacgcatgcgacaatgtcaataaattacttgtaggaaataaaagtgatcttacgactaagaaagttgtcgatttcaatacggctaaggaatacgcggatcagttgggggtaccatttttggagacgtcggcgaagaacgccacgaacgtagagcaggcctttatgacgatggcagccgaaattaaaaatcgattaggaccgccgaccgcggccgcagatcaaggaaacaaagttagattcgatcaaagtcgtcctgttgaaacgactaaatctggatgttgctga

SEQ ID NO: 478 - DNA, 651 bp, Artificial Sequence
  Phyllotreta cruciferae
atggcaacaaatcgaagtggcaccgcccaaagaccaaacggcgctacccagggtaaaatctgccagttcaaattggtgttgctcggcgagagcgccgtcggtaaatccagtctggtgctgaggttcgtcaaaggccagttccacgaataccaagagagcaccataggggctgcgttcctcacgcagaccatctgcttggacgacaccaccgttaaattcgaaatatgggacaccgcgggacaggaaaggtatcacagtttagctccgatgtactatagaggggcgcaggcagctatagtggtgtacgatataaccaatcaagatacgttcggcagagcgaaaacgtgggtgaaggagctccaaaggcaggccagtcccaccattgtgatagccctggccggcaacaagcaggatttggctaacaagaggatggtcgagtacgaggaagcgcaaacgtacgccgacgagaacggtttactcttcatggaaacatcggcgaaaacggcgatgaacgttaacgatatatttttagcaatagctaagaaactgcccaaaaatgaacaaacatccggtcaagggggcagcgcccaaggaaggcgactggcagaaggagatgcgggcgccaaggccccaggaaactgctgcaagtga

SEQ ID NO: 479 - DNA, 549 bp, Artificial Sequence
  Phyllotreta cruciferae
atgggtaatgtgtttgccaatttatttaaaggcctcttcggcaaaaaggaaatgaggatattgatggtaggtttagatgctgctggtaaaaccacaattttatataaactaaaattaggagaaattgtaacaactatcccaactattggttttaatgtcgagactgtagaatataagaatatcagctttacagtatgggatgtcggtggtcaagataaaattaggccattgtggagacactattttcaaaatacgcagggcctaatctttgtagttgacagcaacgacagggagcgtatcaccgaggccaaagacgagctgatgcgtatgctggccgaagacgaactccgggacgccgttcttctgatattcgccaacaagcaggatttgccgaacgctatgaacgccgccgaaatcaccgataagctcggattacattcgttgcgcaaccgtaactggtacatacaggccacgtgcgccaccagcggagacggtctatacgaaggtctggattggttgtctaatcagctgaagaatgccaatcgttag

SEQ ID NO: 480 - DNA, 5055 bp, Artificial Sequence
  Phyllotreta cruciferae
atgacgcagcaactgttaccaatcaagtttcaagaacatttgcagcttaccaatgccggcatcaatgcggctaacatcacgtttgccactctcaccatggagagcgacaagtacatttgcgttagggaaaaggtgggggaaacctcccaagtggtcatcatcgatatggctgacacagccaacccgatcaggagacccatcactgcggaaagtgcaattatgaatccggcttctaaagtcatcgctctcaaaggtaaggctggtatagagacgcagaagaccctccaaattttcaacatagaaatgaaatcgaagatgaaggcccacacgatgtcggaggacgtgtttttctggaaatggatcagccctaataccctggccctcgtcactgagacttcgatctaccattggtcgatggaaggcgattccattccgcaaaaaatgttcgacagacattcctctctgaacggttgccagatcatcaactaccgcaccgatccgaagcaaaactggctgctgttggtgggcatcagcgcccagcagtctcgcgtcgtgggagccatgcaattgtactctgtggaaaggaaatgctcccagcccatcgaaggccatgccgcctctttcgcgaccttcaaaatggagggcaacccagagccttcgactctcttctgcttcgctgtgaggaccttacagggcggtaaattgcacatcattgaagtagggcagaatcccgctggtaaccaaccgtttcccaagaagtctgtggacgttttcttcccgccagaggcccaaaacgatttcccggtggccatgcaggtgtccaccaagtacgatgttatttacttgatcacgaagtacggttacatccacatgtatgacatcgagagcggtacttgcatttacatgaaccggatttctagcgagactatttttgtaacggctcctcatgaatctactggaggaattattggtgttaataggagaggtcaagttttatcggtgtctgtcgatgaggagagcatcattagatacattaatacagtgttgcataacgctgatctagctctacgtttggctactagaaacaacctggccggtgctgaagatctgtttgtcagcaaattccagatgcttttccagaatggacaatacgccgaagccgctaaagtcgccgcaaacgctcctaaaggtatcctcagaacgccagctacaatccaaatgttccagcaagttcctacccaacccggccaaaacagcccgctgctgcaatactttggtatactgctcgatcaagggcaacttaatagatatgaatcattggaattgtgcaaaccggttctactgcaaggtcgcaaacaactcttagaaaaatggttgaaagaggagaaattggagtgttcggaggaattgggggatctggtcaaacaagccgatcccactttggccttgtctgtttatcttagggctaatgtaccagccaaagtgatccaaagcttcgccgaaacgggacaattccaaaaaatcgtactatacgctaaaaaagtttcctacactcctgattatgttttccttttgcgacaagtcatgcgaactaatcccgatcaaggtgccgctttcgccggaatgttggtagccgatgaggagcctctggccgatatcaatcaaatcgtggacattttcatggagcagaacatggtgcaacaatgtacagccttcctcttggacgctttgaagaacaacagacccaccgaaggccacttacaaaccagattgctagagatgaatttgatgtcagctcctcaagtggccgatgccatacttggtaacaacatgttcacgcattacgatcgagcccatgtagctcagctctgcgagaaagccggtcttttgcaaagggctctagagcattacaccgatttgtacgatatcaagcgggctgtggtccacactcatttactaccggccgattggttggtgaatttcttcggaacgttgagcgttgaagacagcttggagtgcctcaaagcgatgctaaccgccaatattcgacaaaatttacaaatttgtgtgcaaatcgctactaaataccacgagcagcttaccactaaatctctcatcgatttgttcgagagcttcaagagctacgaaggtttgttctacttcctcggttcgatcgtaaacttctcccaagaccaggaggtgcactttaagtacatacaagccgcttgtaaaacggggcagatcaaagaagtggagcgcatctgtcgcgaatcgaattgctacaatcccgagcgagtgaagaacttcctcaaagaagctaaattaactgatcaactgccgcttattatcgtttgcgatcgtttcgatttcgtgcacgatttggttttgtacctctacaggaactccttgcagaagtatatcgagatttacgtgcagaaggtcaaccccagtcgtttgcctgttgtcgtgggtggactattggacgtcgattgctccgaagacattattaaaaatctaattttggtagttagaggacaattctccaccgatgaattggtggaggaagtcgaaaagagaaacagattgaagttgctgttgccttggctggagagccgagtacacgaaggctgcgtcgagccagccactcacaacgctttggcgaaaatttacattgattccaacaacaacgccgaacggttcctcaaagaaaaccaatggtacgattctcgcgtagtgggtcgctactgcgaaaaacgcgatccccacctggcttgcgtcgcctacgaacgaggccaatgcgacagagaattgatcgcggtgtgcaatgaaaactccttgttcaagtcggaggcccgttacttggtgcgcaggcgcgacggcgaattgtgggctgaagtacttcaagaaaccaacccctacaggcgccagttgatcgatcaagtagttcaaacggcgctcagcgagactcaggatcccgaagacatttccgtaaccgtgaaagctttcatgacagctgatctaccgaacgaattgattgagttgctggagaagatcgttttggataactctgtgttctctgagcatagaaatctgcagaatttgcttattcttactgcaatcaaagccgatgctactagagttatggattacattaaccgtttagacaactacgatgcgcctgatatagcgaatatcgctataaacaaccatttgtacgaagaagctttcgccattttcaaaaagttcgatgtcaacacctctgcgatccaagtgctcatcgagcaagtcaacaatctagatcgagcttacgaattcgccgaacgttgtaatgaaccggccgtatggagccagctggccaaggcccagctcaaccaaggtttggttaaggaagccatcgattcctacatcaaagctgacgatccttcagcttatattgatgtcgttgagacggcttcgaagaacaacagctgggaggaccttgtacgctacctgcaaatggccaggaagaaggccagagaaagctacatcgaatccgagctgatctactcgtacgccaagaccggccgattggccgatttggaagaattcatcagcggccccaaccacgctgatatccaaaaaatcggcgatagatgcttcgatgacaaaatgtacgatgcggctaaattgctgtacaacaacgtttcgaatttcgctcgactggccatcaccttggtgcatctgaaggagttccaaggggccgtggacagcgcccgcaaggccaacagcaccaggacgtggaaggaggtttgcttcgcctgcgtagacgccgaggagtttagattggcgcaaatgtgcggcatgcatatcgtcgtgcatgccgatgaattgcaggatttgataaactattatcaagacagaggttacttcgaggagttgattggactgttggaagcggctttgggattggagagggcccatatggggatgtttactgagctggctatattgtattcgaaatataaaccggctaggatgcgcgaacatctcgaattgttctggtcgagggttaatattcccaaagtgcttagagcagctgagcaggcgcatttgtgggccgaattagtgttcctgttcgacaaatacgaagagtacgacaacgctgtattggccatgatgacacatcctacagaggcctggcgcgaggggcactttaaagacatcattacgaaagtggcgaatatcgaattgtactacaaagctatccaattttatctggatttcaagccgcttttgttgaatgatctattattggtgctggctccgagaatggatcacactagagcagtggccttcttcaccaaaactggccacctacagctggttaaatcttacttaagatctgtccagaatttgaacaataaagcgatcaatgaggctcttaattctctgcttatagaggaagaggacttccaggggctcagaacgtccatagacgcgttcgataactttgataacataggcttagcgcagagattagagaagcacgaattaaccgaatttagacgcatcgctgcttacctttacaaaggaaacaaccggtggaaacaaagcgtggaattgtgcaaaaaagacaggctgttcagagacgccatggaatatacatcggaatctagaaaccaagaattggccgaagaactattggcttggttcctggacagaaaggcctacgattgcttctcggcttgtctataccactgttatgatttgctgcgaccggacgtgattttggaactggcttggaagcacaacatcatggactttgcgatgccgttcctgatccaggtgactagagaattgactactaaagtcgagaaattagaacaatcggacgctcaacgacaaagcgaagcggccgaagagacgaacaagccgatcatgatgccggagccacagcttatgctaacagcaggtcctgggatgggtattccgcaacagcaatacataccgcagcagacgtacgcccaagtgggctatgcgccgcaaatggcctaccagggctacccgggcatgtaa

SEQ ID NO: 481 - DNA, 3672 bp, Artificial Sequence
  Phyllotreta cruciferae
atgttaaccaagttcgaaaccaaatcagcaagggtaaaaggactctctttccatcccaaaaggccatggattttagccagtttacacaacgggtgcatccagttgtgggattatcgaatgtgcactcttctggaaaagttcgacgagcacgatggacccgtaagaggcatatgtttccacagccaacagcccctattcgtatcaggtggcgatgattataaaataaaagtatggaactacaaacagaaacgttgcatcttcactctactgggacatttggattacattcgtacgaccatgttccaccacgaatacccctggatagtatcagcatccgatgatcaaaccatccggatatggaactggcaatccagaacttgcatttgcgttttaaccggccacaatcactacgttatgtgcgctactttccatccgagcgaagatctactgttatccgcttcattggattctactgtaagagtttgggatatttctggactacgtaagaagaacgtatcaccgggtccctcggggctcgaagatcacctcaaaaatcctggtgctacagagctattcggccaagccgatgctgtggtgaaacacgttttggaaggacatgatcgaggagtgaattgggcatcgtttcaccctttcctacctttaatagcttccggagctgatgacaggcaaataaagctgtggagaatgaacgattcgaaagcttgggaagtagacacgtgcagaggccattataacaatgtgtcttgcgttttgttccatccaagacaggagctgattctgtctaatggtgaagatagaagtataagggtttgggatatggctaaaaggacttgcttgcatacttttagaagggaacatgaacgattttgggtcatgactagccacccgaatcttaatttattcgctgctggtcatgatggtggcatggtaatattcaaattagaacgagagcgaccagcttacacggtgcacggcaacctactgtattacgtcaaagagaagtatttaagaaaactcgattttaccacttcgaaggatgtccctgttattcaaatcagaggcggcggtaaaattccagtatacagaatgtcctttaatccagccgaaaacgcagtactactatctactcgcacttctaatctggataacagcacttacgatttgtacatgattcccaaggatcaagaaagggaggatcacgtgcctgaagccgaaagcaagagatcttcgggtcttacagccttgtgggtagctagaaatcgatttgctgtactggacaggacgcaccagttgatcattaaaaatctaaaaaacgaggtaactaaaaaagttcaaacgcccacttgcgatgaagtcttttacgccggaactggcatgcttttattgagagattccgaacacgttaccttgttcgatgtccaacaaaagaggacgttggctcaagttaaaatcagcaaatgtagatacgtcgtttggtcttctgatatgtcgcatctagctcttctatctaagcacaacgtgacgatttgtaatagaaaattggatgtactgtgctcgttacacgagaataccagagttaagtcgggcgcttgggatgatagcggagttttcatttacactactagtaatcatattaaatatacattgaaaaatggtgatcatggaattattagaaccctggatcttcccatttacataaccagagtaagaggtagtcaggtgttctgtttggacagggaatgtaaacctcgcctcctggtaatcgatcccactgaatacaaattcaaactcgcattgatcaatcacaagtacgaagaagttttgtacatggtcaggaattctcgattggtaggccaaagtatcatatcctacttgcaacaaaaaggatatccagaagtagctttgcattttgtaaaagatgacaaaactaggtttgctctggctttggaatgtggcaacattgaaatagctttagaagcagctaaagctctaaatgataaaaattgttgggatcaattggcacaagccgcattgtggcaaggcaatcatcaaatcgtagaaatgtgctaccaacgtacgaaaagcttcgagaaactatcgttcctctacctaatcaccggcaatttggagaagctgaggaaaatgatgaaaatcgctgaaattagaaaagccagatcgtcccaataccacgccgctttgctgctaggcgatctcgaagaacgtgtaaaactactcaaagcttccaatcaattatctctagcgtatttaaccgccgctacccacggtatgcgagatgaggccgagcagctcaaagaacaaatcggcgatgataaaaaactaccagatgtagatcctaacgctaagttcttgaaacccccaccgccgatccaacaagccgaatccaactggcctttactcacagtcagcaggagtttcttcgagaataccgccgctgcagcgaccgcttcagccaacatgaaatctctgatggcagagcctgtttccgatgtgggtatggaggatgcccaaggctggggcgatgacgacgaattggaactggatcccgacgagaagaaggccgaagttgccgccgccggaggtggagatggcgaaggaggctgggacgtggaggatgaaggtttggaaatacccgatctgggaccgactgcgacggttgaagcagagggtaatttcgtgcatttgcccacacaagggccgtctgcgcttattacttggacgaagaattcgcagttggtggccgatcacgtggcggctggttcgtttgaatcggcggctaggctgcttcacgatcaattgggggtggtggatttcaggcctttcgagagtttgttcttgaacttgtacagtacttcgaagacggtgtcttcttggcagcagaacgtgccgcctttgttcagttacccgtcgaggaattggaaggaagcgaaccttaagaaccagctgcccgcttcgggggtgaaattgaacgatttggtcgctaaattgcagatttgttatcaactgaccactggtggtaaattcactgaagccatcgagaaattacaaacgctgctactgtccgttacattgcttgtagtggacaataaacaagaaatatccgaggctcagcagttactgagaatagccagcgaatatatttgcggtttgcaaatggaaaccttgagaaaaaccttaccgaaaacttcagccgaagagcagaaacgtcagtgcgagatggccgcctatttcacgcattgtaaactacagccgatacatcaaatcctcacgcttaggacggcgctcaacatgttcttcaagctcaaaaactacaaaacggccgcttctttcgccaagaggctgttagaactcggtcctaggcctgaagtagcccagcaagcgaggaaaatattgcaggcttgcgattcgaatcttacagatgatttgcaattgcagtatgacgagcacaatcctttcaacttgtgtgggcactcttatacacctatttataggggaaaggctgaagagaaatgtccattatgcggtacttcttatttacctaaatataaaggggtattgtgtaatatttgcaaagtggcggaagttggaaaggatacgattggattgaggattagcacgcatcagttcaggtaa

SEQ ID NO: 482 - DNA, 546 bp, Artificial Sequence
  Phyllotreta cruciferae
  misc_feature (478)..(478): n is a, c, g, or t
atgggccgatacgctcgcgaacccgacaatgcggcgaagtcttgcaaagccagaggctccaacctccgagtccacttcaagaatacgtgcgagacggcgaacgccataaggaagatgcccctcaagagggccgtggcctacttgaagaacgttgtcgtccagaaagagtgtattccatttaggagattcaacggaggcgtcggccgttgtgcccaagccaagcaattcggcaccacgcagggcaggtggcccaagaagtccgccgaatttctattacagctcctcaggaacgccgagagcaacgcagactacagtggactcgatgtcgataggctagtcgtagaacacatccaagttaacagagctgcttgtttgagacgtcgtacgtacagggctcacggtaggatcaatccctacatgtcgtcgccctgccatatcgaactctggttaaccgaaggggaatcgtcacctgaagcgngcctaagaagagcaacaaaaagaaggcaacggagaagaagagacccaagtcgtccgttgctgcagtag

SEQ ID NO: 483 - DNA, 315 bp, Artificial Sequence
  Phyllotreta cruciferae
atggtgaacgttccgaaacaaaggcgtacattttgcaagaaatgcaaagtccacaagctgcacaaagtgacgcagtacaagaaatccaaagaacgtcacgctgcccagggtagaaggcgttacgacagaaaacagcaaggtttcggtggtcaaactaaacccatcttcaggaagaaggcaaaaaccaccaagaaaatcgtgttgaggatggagtgtgcggactgcaagtacaggaagcagttccctttgaagagatgcaagcacttcgaacttggtggtgacaagaagcgcaagggccagatgatccagttctaa

SEQ ID NO: 484 - DNA, 1251 bp, Artificial Sequence
  Phyllotreta armoraciae
aacgtgtggccgtccagcaggattgaagccactcgtttggtggtaccattagcctgtctctatcagcctatcaaagaacgagtagatcttcctaccatacaatacgatccagtattgtgcacaaggaacaactgcagggctattttaaatccactgtgtcaagtcgattatcgagctaaattatgggtttgcaacttctgttttcaaaggaatccatttcctcaacaatatgcagctatctctgaacaacatcaacctgctgaattaatgccaatgttctcgactattgagtacacaattaacagagttcattgtttacctcccatattcctgtatgttgtcgatacttgcatggatgaagaagaattaggttctcttaaggactcgttgcaaatgtcgttgagtttgttaccgcaaaacgctttgattggcctgattacatttggaaaaatggttcaagttcatgaattgggtactgaaggtgtcagcaaatcgtacgtattccgaggaactaaagatcttacggctaaacaagttcaggaaatgttgggtattggtaaagtcgcaatggctcaacaacaaccacaaccgcaacaacctggacaacctatgagaccaggacaacctcaatctgcacctgtcccacctggtagcagattcctgcaacctatttcaaagtgtgatatgaatttaacggatttaataggagaacaacagaaagatccttggcctgtgcaccaaggtaaaaggccactgagatgcactggtgttgcattatcgattgctatcggcttattggagtgcacttatgcaaataccggagctagggttatgctttttgttgggggttcttgctcacaaggcccaggtcaagttttgaatgacgatttgaaacaacctattaggtcccatcacgatatccaaaaagataatgcaaaatatatgaaaaaagctattaagcattacgatactttagcgatgagagcagcgactaatggtcactgcattgatatttattcctgtgcactcgatcaaactggtttaatggaaatgaaacaatgtgcaaattctacaggtggtcacatggtgatgggagactcttttaattcatcgctgttcaaacaaacattccaaagggtgttcactagagatcagaaaaacgatttgaaaatggcttttaatggaacattagaagtgaaatgttctcgagaattaaaagtgcaaggaggaattggatcctgtgtatcatta

SEQ ID NO: 485 - DNA, 309 bp, Artificial Sequence
  Phyllotreta armoraciae
ggtcccatcacgatatccaaaaagataatgcaaaatatatgaaaaaagctattaagcattacgatactttagcgatgagagcagcgactaatggtcactgcattgatatttattcctgtgcactcgatcaaactggtttaatggaaatgaaacaatgtgcaaattctacaggtggtcacatggtgatgggagactcttttaattcatcgctgttcaaacaaacattccaaagggtgttcactagagatcagaaaaacgatttgaaaatggcttttaatggaacattagaagtgaaatgttctcgagaat

SEQ ID NO: 486 - DNA, 924 bp, Artificial Sequence
  Phyllotreta armoraciae
gttcaaacgctggaagggcatgggcaaaacgtgaccgccgtttgtttccatccggaattaccgatcgctctcaccggcagcgaagacggtacggtcagagtgtggcacgcaaacacccatcgattagagagcagtttgaactacggcttcgaacgggtgtggaccattttttgcttgaaaggctccaataatgtcgctctcggttacgacgaaggcagcattctcgttaaagtcggtagagaagagccggccgtgagcatggacgcgagcggagggaaaatcatctgggctaggcattcggagttacagcaggccaatctgaaagccttacccgaaggagctgaaataagagacggggaacgtttgccggtctccatcaaagatatgggcgcttgcgacatttaccctcaaactattcagcacaatcccaacggccggttcgtggttgtttgcggcgatggagaatacatcatttacactgccatggcgctcaggaacaaagccttcggtagcgcgcaggagttcgtttgggcgcaggattccagcgaatacgccatcagagagtcgggatctaccatcagaatattcaagaacttcaaagagaagaagaattttaaatcagactttggagctgaaggcatctacggtggttatctgttgggcgtaaagtctgtatccggattggctttctacgattgggaaactctggatttggttagaaggatcgaaatacaacctcgctcgatatactggtccgatagcggtaaactagtttgtttggccaccgaggacagttatttcatactatcttatgacgttgatgaagttcagaaagcgagggataacaaccaggtggcagatgatggagtggagtccgccttcaatgtcctaggtgaagtaaacgagtctgttcgtacaggtctc

SEQ ID NO: 487 - DNA, 744 bp, Artificial Sequence
  Phyllotreta armoraciae
cgaatttttgcgaggatcaacattaagatttctatgcaagctaaaggagcccgagctgttggagcctctgatgcccagcattcgaatttgcctcgagcacaggcacagctacgttagaaggaatgctgttctggcaatttttacgatttacaagaattttgaatttctcattcctgacgcccctgaattgatttctacttacctagacggcgaacaagatatgtcttgcaaaagaaatgcttttcttatgctcttgcacgccgatcaagatcgagctctcacttacctatccaattgcttagatcaagtcgcttcgtttggggatatcctacagttggttatcgttgaattgatatacaaagtgtgccactccaaccctaccgaaagatcccggtttattcgatgcatatacaatttattgaattcgagcagtcctgctgttaggtacgaggccgccggtactctgattactttgtccagcgctccgacagctataaaagccgccgccagttgttacatcgaattgatcattaaagagagcgacaacaatgtcaaattgatcgttttggatagattgattgccttgaaggaacatcccagccacgagagggtcctgcaggacttggttatggatatattgagagtgctatcggctcctgatttggaagtgcgaaagaaaacgcttaatttagcgctcgaattggtgtcgtctcgtaacgtcgaagaaatggtgtttgtgctgaa

SEQ ID NO: 488 - DNA, 513 bp, Artificial Sequence
  Phyllotreta armoraciae
caactagaagatggccgtactctttctgattacaacatccagaaggaatccactctccacttggtactcagacttcgtggtggaatgcagatcttcgtgaaaactttaaccggaaagactatcaccttggaagtcgagccatccgacaccattgagaatgtcaaagccaaaattcaggacaaggaaggtatcccaccagaccaacagagattgatcttcgccggaaaacaactagaagatggccgtactctctctgattacaacatccagaaggaatccactcttcacttggtactcagacttcgtggtggtatgcagatcttcgtaaaaactcttaccggcaagaccattactcttgaagtcgaaccatccgacacaatcgagaatgttaaggctaaaattcaggacaaggaaggtatcccaccagaccagcagagattgatctttgctggtaaacaacttgaagatggccgtactctttccgattacaacatccaaaaagaatctacattg

SEQ ID NO: 489 - DNA, 228 bp, Artificial Sequence
  Phyllotreta armoraciae
ttggaagtcgagccatccgacaccattgagaatgtcaaagccaaaattcaggacaaggaaggtatcccaccagaccaacagagattgatctttgccggtaagcaattggaagatggccgtactctttccgactacaacatccagaaggaatctactcttcacttggttttgagacttcgtggtggtatgcagatcttcgtaaaaactcttaccggcaagaccattact

SEQ ID NO: 490 - DNA, 489 bp, Artificial Sequence
  Phyllotreta armoraciae
ggcccaaagcataattgttatgaaaacagacgaaaataagctgtttaaattgtctaacaagcttgttatggctgtatcgggagagtctggtgatactacccaatttgccgagtatattgctaagaatattcagctgtataaaatgagaaatacctacgaacttagcccatcggaagcagcatcgtttactcgtaggaatctcgctgatgctcttagaagcaggagtccctatcacgtaaatttgctactagctggatacgacgataaagaaggccctcaattgtactacatggactatttggcgtcgaccattaaagttaattatgctgctcacggttacggaggcttcttctcgttatccatcatggatagaaactacatcaaatctctgagcagagaagaaggctacgagttgttgaaaaaatgtgtgaaagaagttcagaaaagattaatcatcaatttacccaactttaaggtacagtgtgtcgg

SEQ ID NO: 491 - DNA, 410 bp, Artificial Sequence
  Phyllotreta armoraciae
cgaagaaggccaagaaaggttttatgacccctgaaagaaagaagaaacttaggttattgttgagaaagaaagccgccgaggaattaaagaaggaacaggaaaggaaagcggccgaaagaagacgcatcatcgaagagcgctgtggaaagcccaaattgatcgatgacgccaatgaaggccaacttaagaagatttgcaaagactattatgaccgcatgtatatatgtgaggagcagaaatgggatttggaacgcgaagttcgaaaacgggactgggagatcgcggaattgaacagtcaagtgaacgacctcagaggaaaattcgtgaaacccacgttgaagaaggtgtccaaatacgagaacaaattcgccaagttgcagaagaaggccgccgaatttaacttccgcaac

SEQ ID NO: 492 - DNA, 566 bp, Artificial Sequence
  Phyllotreta armoraciae
aagtcaaggctaccaagaagccacagaagcctcacgttatcgaaaaaccaattaacggagaaaagaacggaggaaaaagatttgtcttagtcaagaaacgtagggcttactatcctactcaagacaagattaagccgaggcctgcgaagaagtccttctgccagcacaaacgttcacttagaactaccattacacccggtactgttcttattttgttggccggttcccacaagggcaagagggtagttttccttaaacaactttactctggtcttctacttgttactggtccgttttcaattaatgcctgtcctttgagacgtattagtcaacgatacgttatcgcaacatctaccaaaatcgatgtcagcggtattaaagttcccgacacctttaacgatgactatttcgcaaggaaacgcgtcaagagggcaaagaaagaagaaggtgatattttccagaccaagaaagaggtttacaaagtaagtgaggaaaggaaaaaggaccagaaggaaatcgacgcgcaggtgatcgctgcgatcaaaaaacaccctgaccataaagtc

SEQ ID NO: 493 - DNA, 512 bp, Artificial Sequence
  Phyllotreta armoraciae
gttataggagccgattctcgtacaaccactggggcgtacatcgcaaacagggtgtccgataaactaacgagagtaaccgatcacatttactgctgccggtcaggttctgctgccgatacggaggccatcgcagacatcgtaggctaccatttgaacttccacgggatggaattgggcgaagagccgagcgtagaagtgggagcagccatattcaaggagctgtgctacaactacagggactctctgatggccggcatactcgtagccggttgggataagaagaaaggcggccagatatattccattccgatcggcgggatgtgcgtgagacaggaagtgtcgatcggtggatccggttcgagctacgtgtacggttacatggacgccaattacaaaccgaaaatgtccaaagaagattgcgttaaattcgtcactaatactttggctctcgctatgtctagagatggttcttccggtggtgtaatcagattaggtatcattacggaggaagg

SEQ ID NO: 494 - DNA, 319 bp, Artificial Sequence
  Phyllotreta armoraciae
tgatactctttgccaacgtcttgcaatgggccctcggcggcgcaatctttgccctttgcctttggatgaggttcgaggagggcatccaagaatggctgcaaaaattggattccgaacaattttacaacggagtttatgtacttatagtcgcttcgctgatcgtcatgattgtgtcctttctgggatgtattagtgccctgcaggagaatacggtgacccttttggcctacatcggcacgcaagttctgagcttcatattcggtttagccgggtcggctgttcttctggataacagcgccagagattcccacttccagcc

SEQ ID NO: 495 - DNA, 747 bp, Artificial Sequence
  Phyllotreta armoraciae
atcacacaagccgatgatgttatcagtatgcttacctacgctttccaagtggcgatgagtctaattcagaatcgagcatttcgcaataccgtcttaagatctctagttggcttgtaccgcggtttaactactccggactacgttaacatgtgccaatgtctgatcttcttggacgatccgctatcagttgcggaaattttggataaattagtctctggtaaagaagagtccgaattgatggcttaccaaatagcttttgatctctatgaatccgcaacgcaacagtttttggaacgagttttggtcgcgcttagagctaccgctcccataccttcgctattagaggaaaaggtcaaatctaaaagcgccgaacaatctagtagcacttctgcagaggcccccaaagatcctgttagcagtgaaactaaaagcgaggcgaaagaagaaaagtctattgagggattgactgagagtgaaaaggaacatcaaaagcgaatcgaaaaattgcataccatcttatcgggcgaagtatcgatagaacttcatcttcaatttctgattagatccaaccacgccgatcttcttattctgaagcaaacgaaagaaacggttcgagttagtatttgtcacactgctacagtcatcgctaacgctttcatgcacagcggtactaccagcgatcaatttttaagggataatttggaatggctagccagagcaacgaattgggcgaaactaacagcaaca

SEQ ID NO: 496 - DNA, 252 bp, Artificial Sequence
  Phyllotreta armoraciae
agacaccatcgaaaatgtcaaagcgaaaattcaagataaggaaggaattcctcccgaccagcagcgattgatttttgcaggtaaacaactcgaagatggccgtaccctttcagattacaacatccagaaggagtctactctccacttggtgctgcgtttgagaggaggaatcatcgagccctctctgcgtcttttggcccaaaagtacaattgcgacaagatgatttgccgcaaatgttacgctagactgca

SEQ ID NO: 497 - DNA, 1094 bp, Artificial Sequence
  Phyllotreta armoraciae
ccgctatacgtgctttatgcagcattaccgatgctaccatgctgcaagccatcgaacgctacatgaaacaagccatcgtcgatagaaattctgctgtcagttcggcagcattggtcagttctttgcacatgaccaaaatggcacctgaagtggttaagagatgggtaaacgaagcgcaggaagctattaatagtgataatgtgatggtgcaatatcatgccttggggctcctgtatcacatcagaaaaacagataggctggctgttacaaaattaatagctaaactaaccagaactactctgaaatctccatacgctgtttgcatgctcatcagaataatagccaagctactcgaagaagaagattctggcaatgattttccctattttgatttcatcgaatcttgcctaaggcacaaatctgagatggtagtttacgaagcagcccacgccatcgttaatctcaaaggtaccactagcaaagaactggcgccggctgtgagcgtattacaattgttctgcggttcaccgaaggctactttgagattcgccgccgttagaactctgaatcaagtggccatatctcatccggccgctgtgacggcttgtaatttggatttggagaatttgattactgattctaatcgatcgatagctactcttgctatcactactttattgaaaactggtgctgaatcgtccgttgatcgtctgatgaaacaaatagcgagttttgtgtctgaaattagcgatgaattcaaagttgtagtagtccaagcgatcagagcgctggctcttaaattccctcgaaagcacaacactctcatgaactttttatcggctatgctaagagacgaaggcggtttggaatacaaagcttccattgcagacaccataatcactataatcgaagataatcccgaagctaaagaatctggtttggctcatctgtgcgagtttattgaagattgcgaacacgtttctttagctgttagaatattgcatctgttgggtagagaaggaccgaaaaccaagcaaccttctaggtacatccgtttcatctacaatcgcgtcatcttagagtgcccttccatc

SEQ ID NO: 498 - DNA, 652 bp, Artificial Sequence
  Phyllotreta armoraciae
aatgcgctgtagttaaaacgtccacgagacagacctatttcttacccgtgataggactagtcgatgaggagaaactaaaaccgggagatctagtgggagtgaacaaagactcttatctaattttggaaacattacccgcagagtacgatgccagagtcaaggccatggaagtcgatgagaggccttctgaacagtattccgatatcggaggtttagataaacaaatacaggaacttatagaggctgttgtactacctatgactcataaagacaagttcgttaatttgggaattcatcctcctaaaggtgttctactttacggccccccaggtaccggaaagaccctcctagccagagcctgcgccgcccaaactaaatcaacctttctcaaactggccggtcctcagttagtccagatgttcataggcgacggcgccaagttagtccgggacgccttcgccttggccaaagagaaagcccccgctataatattcatcgacgaattggacgccatcggtacgaagcgattcgactctgagaaagccggcgacagggaagtccaaagaaccatgttggagctgctgaaccaactggacggtttcagttcgacctccgacatcaaagtcatagcagctactaatcgcgtggatat

SEQ ID NO: 499 - DNA, 527 bp, Artificial Sequence
  Phyllotreta armoraciae
ggagaagctatccaaaagctcagggaaaccgaggacatgttatataaaaaacaggagtttttagaaaagaaaatagaggaatacacattagtagccaaaaaaaatgcatcaaagaataagagagttgcgctgcaagcgctcaaaaagaaaaaacgattggagaaaactcaattacaaatagatggaacactcactaccattgaaatgcaaagggaggccctcgaaggggccagcaccaacacagccgtcttagactctatgaagaatgctgctgaagccctacagaaagcacacaaaaacttgaatgttgatgatgtccacgatatcatggatgacatagctgaacagcatgacatcgccaacgaaattactactgctattagccagccggttggcttcaacgatgatttggatgaggatgaattagaaagtgaactagagaagctcgaacaagaaggattggaggaagatttactgaaagttcccggcccaaccgaattacctgctgtacctacaggagctattgc

SEQ ID NO: 500 - DNA, 485 bp, Artificial Sequence
  Phyllotreta armoraciae
gctattgagatttgcggatgatacttatacggaaagttatattagtactattggagtagattttaaaatcagaacaatcgacttagatggaaaaacgattaaattgcaaatttgggataccgccggacaggaacgatttagaactataacatcgagttactacaggggcgcgcacggaatcatcgtcgtgtacgattgcacagaccaggactccttcaacaacgtgaaacaatggttggaggaaatcgaccgttacgcatgcgacaacgtcaataaattacttgtagggaataaaagtgatctgacgactaagaaagtcgtcgatttcaatacggccaaggagtacgcggatcagttgggcgtaccatttttggagacgtcggcgaaaaacgccaccaacgtagagcaggcctttatgacgatggcggcggaaattaaaaatcgattaggaccgccgaccgcggccgcagatcaaggaaacaaag

SEQ ID NO: 501 - DNA, 505 bp, Artificial Sequence
  Phyllotreta armoraciae
tcagttcaaattggtgttgctcggcgagagcgccgtcggtaaatccagtctggtgctgaggttcgtcaagggccagttccacgagtaccaggagagcaccataggggctgctttcctcacgcagaccatttgcttggacgataccaccgttaaattcgaaatatgggacaccgcgggacaagaaaggtatcacagtttagctccgatgtactacagaggggcgcaggcagctatagtggtgtacgatataaccaatcaagatacgttcggcagagcgaaaacgtgggtgaaggagctccagaggcaggccagtccgacgattgtgatagccctagccggtaataagcaggatttggctaacaagcggatggtggagtacgaggaggcgcaaacgtacgccgatgaaaatggtttgctgttcatggaaacatcggcgaaaacggcgatgaacgttaacgatatatttttagcaatagctaagaaactgcccaaaaatgaacaaaca

SEQ ID NO: 502 - DNA, 406 bp, Artificial Sequence
  Phyllotreta armoraciae
atggtaggtttagatgctgctggtaaaaccacaattttatataaactaaaattaggagaaattgtaacaaccatcccaactattggttttaatgtcgagactgtagaatataagaatatcagcttcaccgtgtgggatgtcggtggtcaggataaaattaggccattgtggagacactattttcaaaatacccagggcctaatctttgtagtggacagcaacgacagggaacgtatcaccgaggccaaagacgagctgatgcgtatgctggccgaagacgagctcagggacgccgttctgctgatattcgccaacaagcaggatttgccgaacgctatgaacgccgccgaaatcaccgataagctcggactacattcgttgcgcaaccgtaactggtacatacagg

SEQ ID NO: 503 - DNA, 785 bp, Artificial Sequence
  Phyllotreta armoraciae
actcgttgcagaagtacattgaaatttacgtgcagaaagtcaatcccagtcggttacccgtggtcgtgggcgggcttttggacgtcgattgttccgaagacatcattaaaaatctaattttggtagttagaggacaattctcgaccgacgaattagtcgaagaagtcgaaaagcgaaacagattgaaactgctgttgccttggttggagagccgtgttcacgaaggatgcgtcgagcctgccactcacaacgctctggcgaaaatttacatagattccaacaacaacgccgaacggttcttgaaagaaaaccaatggtacgattctcgcgttgtgggtcgttactgcgaaaaacgcgatcctcacctggcttgcgtcgcatacgaacgaggccaatgcgacagagaattgatcgcggtgtgcaatgaaaactccctgttcaagtctgaggctcgttacttggtgcgcaggcgcgacggcgaattgtgggctgaagtacttcaagaagcaaacccgtacagacgtcagttgatcgatcaagtagttcaaacggcgcttagcgagactcaggatcccgaagatatttctgtaaccgtaaaagctttcatgacagctgacttaccgaacgaattgatcgaattgctggagaaaatcgttttggataactctgtgttctctgagcacagaaatcttcagaatttacttattcttaccgcaatcaaagccgatgctactagagttatggattacattaaccgtttagacaactacgacgctcctgatata

SEQ ID NO: 504 - DNA, 739 bp, Artificial Sequence
  Phyllotreta armoraciae
cgaactagaactggatcctgacgagaagaaggccgaagtcgccgccgcaggaggcggtgatggcgaaggcggctgggacgtggaggacgaaggtttggaaatccccgatctcggaccgaccgcaaccgtagaagcagaaggcaatttcgtgcatttacccactcaagggccgtctccgcttattgtttggacgaagaattcgcagttggtggccgatcatgtggctgcgggttcattcgaatcggccgccaggttgcttcacgatcaattaggagtggtgaatttcaggcctttcgagagtttgtttttgaatttgtacagtacttcgaagacggtgtcttcttggcagcaaaacgtaccgccttcgttcagttacccgttgaggaattggaaggaaggaaacgttaagaatcagctgcccgcttcgggagtgaaattgaacgatttagtagcaaaattgcagatttgctatcaattgacgaccggtgggaaattcacggaagccatcgagaaattgcaaactctgctgttgtcagttacgcttctcgtggttgataacaaacaggaaatttccgaggctcagcagttactcagaatagccagcgagtatatttgcggtttgcaaatggaaactttgaggaaaactctaccgaaaacttcggccgaagagcagaaacgccagtgtgaaatggccgcgtatttcacccattgtaaattacagccgatacatcaaatcctc

SEQ ID NO: 505 - DNA, 438 bp, Artificial Sequence
  Phyllotreta armoraciae
ccaaccttagagtccacttcaagaatacatgcgagaccgcgaacgccataaggaagatgcccctcaaaagggcagtagcctatttgaagaatgtcgtcattcaaaaagagtgtattccatttaggaggtttaacggaggagttggtcgttgtgctcaagccaagcaatttggcacgacacagggtagatggcccaagaagtccgcggaatttctgttacagctcctcaggaacgccgagagcaacgcagattacagtgggcttgatgtcgataggctagttgtagaacacattcaagttaacagagctgcttgtttgagacgtcgtacgtacagggctcacggtagaatcaatccgtacatgtcgtctccctgtcacatcgaactctggttaaccgagggagaatcgtcacctgaagctcccaagaagagcaacaaaa

SEQ ID NO: 506 - DNA, 177 bp, Artificial Sequence
  Phyllotreta armoraciae
aaaatccaaagaacgtcacgcttcgcagggtagaagacgttacgacagaaaacagcagggtttcggtggtcagactaaacctattttcaggaagaaggcaaaaaccaccaagaaaatcgtgttgaggatggagtgtgctgattgcaagtacaggatgcagttccccttgaagagatg

SEQ ID NO: 507 - DNA, 745 bp, Artificial Sequence
  Phyllotreta cruciferae
tgacgatttgaaacagcctattaggtcccatcatgatatccaaaaagataatgcaaaatatatgaagaaagctattaagcattatgatactttagcgatgagagcagcgactaatggtcattgcattgatatttattcctgtgcacttgatcaaactggtttaatggaaatgaaacaatgtgctaattcaacaggtggtcacatggtgatgggagattcttttaattcatcgctctttaaacaaacattccaaagggtgttcacacgagatcagaaaaacgatttgaaaatggcttttaacggaacattagaagtgaaatgttctcgagaattaaaagtgcaaggaggaattggatcctgtgtatcattaaacgtcaaaagtcaactggtctctgacacagaaatcggcatgggcaacactgtacaatggaaaatgtgtacgcttactccaagcactacgatggccttgttcttcgaagtcgtcaatcagcattctgcgccaattccgcaaggaggaagaggttgcatacaatttattactcaatatcaacactcaagtggtcaaagaaggattagagtgacaacagtggctcgaaactgggctgatgccactactaatatccaccacatcagcgctggttttgatcaggaagcagcagctgtaattatggccagaatggctgtttatagagctgaatcagatgagagtcccgacgttctgagatgggtcgatagaatgctgatt

SEQ ID NO: 508 - DNA, 765 bp, Artificial Sequence
  Phyllotreta cruciferae
aggatcgaaatacaacctcgctcgatatactggtctgatagcggcaaactagtttgtttagccaccgaagatagttatttcatactctcttatgatgctgaagaagttcaaagagcaaaggataataaccaggtggccgatgatggagtggagtccgccttcaatctactgggtgaagtgaacgagtctgttcgtacaggtctctgggtaggagattgcttcatttacacaaacgccgtaaaccgtatcaattacttcgtcggaggtgaattggtgaccatcgcacatctggatggcccattgtacgtactgggctatgttccaaaggatgataggctctatttagtcgacaaagaattaagagtggtcagctatcagctgctcctttcggtcttagagtaccaaactgccgttatgagaagagacttctcgacagctgacagagtgttgccttcgattcctaaggaacaccgaacgagagtggctcatttcttggaaaagcaaggcttcaaacaacaagctctggccgtgagcactgatcctgaacacaggttcgaactggctgtagctttggaggatttgaataccgccaagatgctggctcaggaagctaacaatccgcagaaatggagccagctggccgatttagcggcgtccacgaataatctcgtgttggccaaagagtgcatgcagaaagcccaagattacggtggattattgctcttggctaccagttctggagatgacgaggtagtgaggacatta

SEQ ID NO: 509 - DNA, 704 bp, Artificial Sequence
  Phyllotreta cruciferae
tctttggcctctactttgaccaaattggctttaagatatggtgaaaacgtttccgcttccgataggaataaattcgacgctgaagttatgcttattatggctggcattttgcatttaggcaaatcaggtttgccggtaaaacagataactaacgacgacaacgaccacattctcttctgcctgcgcgtgctatccgatcgcacggagcccgtcgtccaagtattctcgagcctgtgccgcaacgccctcaacgacatgctgctggccaaggaaaccgaagaggcgaccgatcagaaatcgcgagagaaatcccgagccgccgtccaaaccgacgacgccatcaccttcgtgcaactggagtccgaccgaagcggcgagctcggcgaaaacgtcttcgaaacctccctgtcgcaggccctaatgggcggcaagacggggcaatcggactccaccatcggctcgagtaaattgaacaagatcgcccagttgacgggtttctcggatcctgtttactccgaagcgtatgtgcacgttaatcagtacgatatcgtgctggacgtgttggtggtgaaccaaacgagcgacacgctgcagaattgtactctggagttggcgactctgggcgatttgaagttggtggagaagcctcagccggtcgttctggcgccgaaggatttctgcaatatcaaggctaacgtgaaagt

SEQ ID NO: 510 - DNA, 704 bp, Artificial Sequence
  Phyllotreta cruciferae
  misc_feature (566)..(662): n is a, c, g, or t
acaccatcgagaatgtcaaagctaaaattcaggacaaagaaggtatcccaccagaccaacagagattgatcttcgctggtaaacaattggaagatggccgtactctttctgattacaacatccagaaagaatctactcttcacttggttttgagacttcgtggtggtatgcaaatcttcgtaaaaactctcaccggcaagaccatcacccttgaagtcgagccatctgacactattgagaatgttaaagccaagatccaggacaaagaaggtatcccaccagaccaacaaagattgatcttcgctggaaagcaattggaagatggccgtactctttctgattacaacatccagaaggaatcgacccttcacttggttttgagacttcgtggtggcatgcagatcttcgtaaaaactcttactggaaaaaccatcacccttgaagtcgagccatccgacactattgagaatgttaaagccaagatccaggacaaagaaggtatcccaccagaccaacaaagattgatcttcgccggaaagcaattggaagatggccgtactctttcnnnnnnnnnnnnnnnnnnnnnnnnnnnnnnnnnnnnnnnnnnnnnnnnnnnnnnnnnnnnnnnnnnnnnnnnnnnnnnnnnnnnnnnnnnnnnnnnncagagattgatcttcgcaggaaaacaattagaagatggccgt

SEQ ID NO: 511 - DNA, 491 bp, Artificial Sequence
  Phyllotreta cruciferae
ggcccaaagcataattgttatgaaaacagacgaaaataagctgtttaaattgtctaacaagcttgttatggctgtatccggagaatccggcgatactacccaatttgccgagtacattgctaagaatatccagttgtataaaatgagaaatacctacgaacttagcccatcggaagcagcatcctttactcgtaggaatctcgctgatgctcttagaagcagaagtccttatcacgtaaatttgttgctggctggatacgacgagaaagaaggcccccagttatactacatggactacttggcgtcgaccatcaaagttaattacgctgctcacggctacggagggttcttctcgttgtctataatggacagaaactacgtcaaatcgctcagtagagaagaaggctacgagttgttgaaaaaatgcgtgaaagaagttcaaaaaagattaatcatcaatttacctaactttaaggtacagtgtgtaggca

SEQ ID NO: 512 - DNA, 338 bp, Artificial Sequence
  Phyllotreta cruciferae
gccgaggaattaaagaaggaacaggaaaggaaagcggccgagaggagacgcatcatcgaagaacgctgtggaaagcccaaactgatcgatgacgccaatgaagaacaacttaagagtatttccaaagcgtatcacgagagaatttgcaagctggaagaccagaaattcgatttggaatatctagtcaaaaagaaagacatggagatcgcggaattgaacagccaagtaaacgacctcagaggaaaattcgtgaaaccgacgttgaagaaggtgtcgaaatacgagaacaaattcgccaagttgcagaagaaggccgccgaatttaacttccgcaacca

SEQ ID NO: 513 - DNA, 645 bp, Artificial Sequence
  Phyllotreta cruciferae
taggaaatggcgttatgaggttttcaagaaccaagatgttccacaagaaggctttatataaatttattggcaaaaaagttaaggctaccaagaagccgcaaaagcctcacgttatcgaaaagccaattaatggagaaaagaacggaggaaagagattcgtcttagtcaagaaacgtagggcgtactatcctactcaagacaagataaagccgaggcctgcaaagaaatccttctgtcagcacaaacgctcgctcagaactaccatcactcctggtaccgttcttattttgttggctggttcccacaagggaaagagggtcgttttcctgaaacaactttactctggccttttacttgtcaccggtccgttttctattaatgcctgtccgttgagacgtattagtcaacgatacgttattgcgacatcgaccaaaattgatgttagcggtattaaagttcccgacaactttgacgatgactatttcgcgaggaaacgcgtcaagagggcaaagaaagaagaaggtgatattttccaaaccaagaaagaggtttacaaagtaagtgaggaaaggaaaaaggaccagaaggaagtcgattcacaggtgatggcagcgatcaaaaaacatcctgatcgtaaagttctgc

SEQ ID NO: 514 - DNA, 610 bp, Artificial Sequence
  Phyllotreta cruciferae
taccggaacttccattatggcatcagaattcgacggtggagtcgtcataggagccgattcacgtacaaccaccggggcctacatcgcaaacagagtctctgacaaactaacgagagtcactgatcacatctactgctgccggtcgggctccgctgccgatacggaggccatcgcagatatcgtaggataccatttgaacttccacgggatggaattaggggaagagcccagcgtagaagtaggagctgctatattcaaggagctgtgctacaattacagggactccttgatggccggtatactcgtagcaggttgggataagaagaaagggggccagatttattccatacccattggtggaatgtgcgtgagacaggaggtgtccatcggggggtccggatcgagctacgtgtacggctacatggacgccaattacaaaccgaaaatgtctaaagaagattgcgttaaattcgttactaatactttggctctcgcaatgtctagagatggttcttctggcggtgtaatcagattaggtatcatcacggaggaaggtatagaacgtagggttgtattaggtaacgaattgcccaaattttacgaaggctaa

SEQ ID NO: 515 - DNA, 612 bp, Artificial Sequence
  Phyllotreta cruciferae
atactctttgccaacgtcttgcaatgggccctcggcggcgcaatctttgccctttgcctttggctgaggttcgaggagggcatccaagaatggctgcagaaattggattccgaacaattttacaacggagtttatgtacttatagtcgcttcgctgatcgtcatgattgtgtcctttctgggatgtattagtgccctgcaggagaatacggtgacccttttggcctacatcggcacgcaagtgctgagcttcatattcggtttagccgggtcggctgttcttctggataacagcgccagagattcccacttccagccgaggattcgggagagcatgcgacgtcttatcatgaatgctcatcacgagccatccagagtaacgctcgccatgattcaggaaaatatcggctgctgcggtgctgacggagcagaagattacttggcgctgcaacagccattaccgagccaatgcagggacaccgtcaccggtaatccctatttccacggatgcgtcgacgagctcacgtggttcttcgaggagaagtgcgcctggatagccgcattggccatgtgcatttgcttcttcaacgtttttaacatcgtgctttccact

SEQ ID NO: 516 - DNA, 679 bp, Artificial Sequence
  Phyllotreta cruciferae
cagttagctgctttagttgctagtaaagtgtactatcatctgggtgcatttgaagactcattaacgtacgctttgggagctggtgatctcttcgacgtaaatgctagaacagaatatgttgaaacaacacttgcaaaatgcatcgacttctatacacaacaacgcatcgccttagcagaaggtgcaaccgatgcgaaacctattgattcgagactcgaagcgattgtaaaccgaatgttccaacgttgtttggatgacgggcaaaaccgccaggctatggggctcgctttagagaccaggagaatggatatcttcgaattatctatcacacaagctgaggatattattagtatgctcacctacgctttccaagtggcgatgagcctaattcagaatagggcatttcgtaacactgttttaagatcgttggttggcttgtatcgcggtttgactacaccagattacgttaacatgtgtcaatgtctaattttcttggacgatgcactaccagtcgcagaaatattggataagttagtgtctggtaaagaagagtctgagttgatggcttaccaaatagcttttgatctttatgagtcagcaacgcaacagtttttggaaagagttttggttgccctaagagctactgctcccattccttcgctgttagaggaaaaggtga

SEQ ID NO: 517 - DNA, 250 bp, Artificial Sequence
  Phyllotreta cruciferae
agacaccatcgaaaatgtcaaagctaagattcaagataaggaaggtattcctcccgaccagcagcgattgattttcgcaggtaaacaactggaggatggccgtaccctttcagattacaacatccaaaaggagtctaccctccacttggtgctccgttttagaggaggaatcatcgagccctctctgcgtcttctggcccaaaagtacaattgcgacaagatgagttgccgcaagtgttacgctagacta

SEQ ID NO: 518 - DNA, 686 bp, Artificial Sequence
  Phyllotreta cruciferae
acgaaacatcagtgaatccaagaaaatgcaccctaattctcaccaaattgctttacctactaaatcagggggaagctttaaacgtaaaagaagcaacagacgttttcttcgcaatgaccaaactattccaatcgaaggacgtaatacttcgaagaatggtgtacctaggcatcaaagagctgagctcgaccgcagacgatgtaatcatagtaacttcgagcctcaccaaagatatgaccggcaaagaagacatttacagagcagctgctatacgtgctttatgcagcatcaccgatgctaccatgctacaagccatcgaacggtacatgaagcaagcaatcgtagatagaaattccgctgtcagttcagccgcattggtcagctctttgcacatgaccaaaatggcacctgaagtggtgaaaagatgggtaaacgaagcacaggaagctattaatagtgataatgtaatggtgcaatatcacgccttggggctcctataccacatcagaaaaacagataggttggctgttacaaaattaatagctaaactaaccagaactaccctgaaatctccttatgctgtttgtatgcttatcagaataatagccaagctcctcgaagaagaagattccaacaatgattttccctacttcgatttcatcgaatcttgtctaaggcacaagtct

SEQ ID NO: 519 - DNA, 651 bp, Artificial Sequence
  Phyllotreta cruciferae
tgctggacaacgagattaaaataatgaagagcgaagtgatgcgaataaaccacgaactgcaggcgcaaaacgagaagatcaaagagaataccgagaaaataaaagtgaacaaaaccttgccttacttggtttcgaacgtaatagaactgttggacgtggatccccaagaagaggaagaggacggcgcagtagtcgatttggattctcaaagaaaagggaaatgcgctgtagttaaaacgtccacaagacagacctattttctaccagttataggactagtcgatgaggagaaattgaaaccgggtgatctagtgggagtcaacaaagactcttatctaattttggaaacattacccgcagagtacgatgccagagtcaaggctatggaagtcgacgaaaggccttctgagcagtactccgatatcggaggtttagataaacaaatacaagaacttatcgaagctgttgtactacctatgacgcataaagacaagttcgttaatttgggaattcatcctcctaaaggtgttctcctttacggccccccgggtaccggaaaaaccctcctagccagagcctgcgccgcccaaacgaaatcaactttcctcaaactggccggtcctcagttagtccagatgttcataggagacg

SEQ ID NO: 520 - DNA, 530 bp, Artificial Sequence
  Phyllotreta cruciferae
ggaaaccgaggacatgttatataaaaaacaagagtttttagaaaagaaaatagaggaatatacactagtagccaaaaaaaatgcatcaaagaataagagagtcgcgctgcaggcgctcaaaaagaaaaaacgattggaaaaaactcaattacaaatcgatggcacactcactacaatcgaaatgcaaagggaggccctcgaaggagccagcaccaacacagccgtcttagattcaatgaagaatgcagctgaagctctccaaaaagcccacaaaaacttgaatgtcgatgatgtccacgacatcatggatgacatagctgaacagcatgacattgccaacgagattactactgctattagccagccggtaggcttcgctgatgatttggacgaggatgaattagaaagcgaactagaaaagctcgaacaagaaggattagaggaagatttgctgaaagttccaggcccaactgaactacctgctgtacctacaggagctattgccaagcccgttaaacctgctgctaaaa

SEQ ID NO: 521 - DNA, 485 bp, Artificial Sequence
  Phyllotreta cruciferae
gctattgagatttgcggatgatacttatacggagagttatattagtactattggagtagattttaaaatcagaacaatcgacttagatggaaaaacaattaaattgcaaatttgggataccgccggtcaggaacgatttagaactataacatcgagttactacaggggagcgcacggaatcatcgtcgtgtacgattgcacagaccaggactctttcaacaacgtgaaacaatggttggaggaaatcgaccgttacgcatgcgacaatgtcaataaattacttgtaggaaataaaagtgatcttacgactaagaaagttgtcgatttcaatacggctaaggaatacgcggatcagttgggggtaccatttttggagacgtcggcgaagaacgccacgaacgtagagcaggcctttatgacgatggcagccgaaattaaaaatcgattaggaccgccgaccgcggccgcagatcaaggaaacaaag

SEQ ID NO: 522 - DNA, 504 bp, Artificial Sequence
  Phyllotreta cruciferae
cagttcaaattggtgttgctcggcgagagcgccgtcggtaaatccagtctggtgctgaggttcgtcaaaggccagttccacgaataccaagagagcaccataggggctgcgttcctcacgcagaccatctgcttggacgacaccaccgttaaattcgaaatatgggacaccgcgggacaggaaaggtatcacagtttagctccgatgtactatagaggggcgcaggcagctatagtggtgtacgatataaccaatcaagatacgttcggcagagcgaaaacgtgggtgaaggagctccaaaggcaggccagtcccaccattgtgatagccctggccggcaacaagcaggatttggctaacaagaggatggtcgagtacgaggaagcgcaaacgtacgccgacgagaacggtttactcttcatggaaacatcggcgaaaacggcgatgaacgttaacgatatatttttagcaatagctaagaaactgcccaaaaatgaacaaaca

SEQ ID NO: 523 - DNA, 406 bp, Artificial Sequence
  Phyllotreta cruciferae
atggtaggtttagatgctgctggtaaaaccacaattttatataaactaaaattaggagaaattgtaacaactatcccaactattggttttaatgtcgagactgtagaatataagaatatcagctttacagtatgggatgtcggtggtcaagataaaattaggccattgtggagacactattttcaaaatacgcagggcctaatctttgtagttgacagcaacgacagggagcgtatcaccgaggccaaagacgagctgatgcgtatgctggccgaagacgaactccgggacgccgttcttctgatattcgccaacaagcaggatttgccgaacgctatgaacgccgccgaaatcaccgataagctcggattacattcgttgcgcaaccgtaactggtacatacagg

SEQ ID NO: 524 - DNA, 671 bp, Artificial Sequence
  Phyllotreta cruciferae
aagccatcgattcctacatcaaagctgacgatccttcagcttatattgatgtcgttgagacggcttcgaagaacaacagctgggaggaccttgtacgctacctgcaaatggccaggaagaaggccagagaaagctacatcgaatccgagctgatctactcgtacgccaagaccggccgattggccgatttggaagaattcatcagcggccccaaccacgctgatatccaaaaaatcggcgatagatgcttcgatgacaaaatgtacgatgcggctaaattgctgtacaacaacgtttcgaatttcgctcgactggccatcaccttggtgcatctgaaggagttccaaggggccgtggacagcgcccgcaaggccaacagcaccaggacgtggaaggaggtttgcttcgcctgcgtagacgccgaggagtttagattggcgcaaatgtgcggcatgcatatcgtcgtgcatgccgatgaattgcaggatttgataaactattatcaagacagaggttacttcgaggagttgattggactgttggaagcggctttgggattggagagggcccatatggggatgtttactgagctggctatattgtattcgaaatataaaccggctaggatgcgcgaacatctcgaattgttctggtcgagggttaatattccc

SEQ ID NO: 525 - DNA, 783 bp, Artificial Sequence
  Phyllotreta cruciferae
gaaagcttgggaagtagacacgtgcagaggccattataacaatgtgtcttgcgttttgttccatccaagacaggagctgattctgtctaatggtgaagatagaagtataagggtttgggatatggctaaaaggacttgcttgcatacttttagaagggaacatgaacgattttgggtcatgactagccacccgaatcttaatttattcgctgctggtcatgatggtggcatggtaatattcaaattagaacgagagcgaccagcttacacggtgcacggcaacctactgtattacgtcaaagagaagtatttaagaaaactcgattttaccacttcgaaggatgtccctgttattcaaatcagaggcggcggtaaaattccagtatacagaatgtcctttaatccagccgaaaacgcagtactactatctactcgcacttctaatctggataacagcacttacgatttgtacatgattcccaaggatcaagaaagggaggatcacgtgcctgaagccgaaagcaagagatcttcgggtcttacagccttgtgggtagctagaaatcgatttgctgtactggacaggacgcaccagttgatcattaaaaatctaaaaaacgaggtaactaaaaaagttcaaacgcccacttgcgatgaagtcttttacgccggaactggcatgcttttattgagagattccgaacacgttaccttgttcgatgtccaacaaaagaggacgttggctcaagttaaaatcagcaaatgtagatacgtcgtttggtc

SEQ ID NO: 526 - DNA, 399 bp, Artificial Sequence
  Phyllotreta cruciferae
ccgagtccacttcaagaatacgtgcgagacggcgaacgccataaggaagatgcccctcaagagggccgtggcctacttgaagaacgttgtcgtccagaaagagtgtattccatttaggagattcaacggaggcgtcggccgttgtgcccaagccaagcaattcggcaccacgcagggcaggtggcccaagaagtccgccgaatttctattacagctcctcaggaacgccgagagcaacgcagactacagtggactcgatgtcgataggctagtcgtagaacacatccaagttaacagagctgcttgtttgagacgtcgtacgtacagggctcacggtaggatcaatccctacatgtcgtcgccctgccatatcgaactctggttaaccgaaggggaatc

SEQ ID NO: 527 - DNA, 191 bp, Artificial Sequence
  Phyllotreta cruciferae
acgcagtacaagaaatccaaagaacgtcacgctgcccagggtagaaggcgttacgacagaaaacagcaaggtttcggtggtcaaactaaacccatcttcaggaagaaggcaaaaaccaccaagaaaatcgtgttgaggatggagtgtgcggactgcaagtacaggaagcagttccctttgaagagatgcaa

SEQ ID NO: 528 - DNA, 21 bp, Phyllotreta armoraciae
aacgtgtggccgtccagcagg

SEQ ID NO: 529 - DNA, 21 bp, Phyllotreta armoraciae
ggtcccatcacgatatccaaa

SEQ ID NO: 530 - DNA, 19 bp, Phyllotreta armoraciae
gttcaaacgctggaagggc

SEQ ID NO: 531 - DNA, 20 bp, Phyllotreta armoraciae
cgaatttttgcgaggatcaa

SEQ ID NO: 532 - DNA, 22 bp, Phyllotreta armoraciae
caactagaagatggccgtactc

SEQ ID NO: 533 - DNA, 21 bp, Phyllotreta armoraciae
ttggaagtcgagccatccgac

SEQ ID NO: 534 - DNA, 20 bp, Phyllotreta armoraciae
ggcccaaagcataattgtta

SEQ ID NO: 535 - DNA, 20 bp, Phyllotreta armoraciae
cgaagaaggccaagaaaggt

SEQ ID NO: 536 - DNA, 20 bp, Phyllotreta armoraciae
aagtcaaggctaccaagaag

SEQ ID NO: 537 - DNA, 20 bp, Phyllotreta armoraciae
gttataggagccgattctcg

SEQ ID NO: 538 - DNA, 21 bp, Phyllotreta armoraciae
tgatactctttgccaacgtct

SEQ ID NO: 539 - DNA, 24 bp, Phyllotreta armoraciae
atcacacaagccgatgatgttatc

SEQ ID NO: 540 - DNA, 20 bp, Phyllotreta armoraciae
agacaccatcgaaaatgtca

SEQ ID NO: 541 - DNA, 23 bp, Phyllotreta armoraciae
ccgctatacgtgctttatgcagc

SEQ ID NO: 542 - DNA, 20 bp, Phyllotreta armoraciae
aatgcgctgtagttaaaacg

SEQ ID NO: 543 - DNA, 20 bp, Phyllotreta armoraciae
ggagaagctatccaaaagct

SEQ ID NO: 544 - DNA, 20 bp, Phyllotreta armoraciae
gctattgagatttgcggatg

SEQ ID NO: 545 - DNA, 20 bp, Phyllotreta armoraciae
tcagttcaaattggtgttgc

SEQ ID NO: 546 - DNA, 20 bp, Phyllotreta armoraciae
atggtaggtttagatgctgc

SEQ ID NO: 547 - DNA, 20 bp, Phyllotreta armoraciae
actcgttgcagaagtacatt

SEQ ID NO: 548 - DNA, 20 bp, Phyllotreta armoraciae
cgaactagaactggatcctg

SEQ ID NO: 549 - DNA, 20 bp, Phyllotreta armoraciae
ccaaccttagagtccacttc

SEQ ID NO: 550 - DNA, 20 bp, Phyllotreta armoraciae
aaaatccaaagaacgtcacg

SEQ ID NO: 551 - DNA, 20 bp, Phyllotreta cruciferae
tgacgatttgaaacagccta

SEQ ID NO: 552 - DNA, 20 bp, Phyllotreta cruciferae
aggatcgaaatacaacctcg

SEQ ID NO: 553 - DNA, 20 bp, Phyllotreta cruciferae
tctttggcctctactttgac

SEQ ID NO: 554 - DNA, 20 bp, Phyllotreta cruciferae
acaccatcgagaatgtcaaa

SEQ ID NO: 555 - DNA, 20 bp, Phyllotreta cruciferae
ggcccaaagcataattgtta

SEQ ID NO: 556 - DNA, 20 bp, Phyllotreta cruciferae
gccgaggaattaaagaagga

SEQ ID NO: 557 - DNA, 20 bp, Phyllotreta cruciferae
taggaaatggcgttatgagg

SEQ ID NO: 558 - DNA, 20 bp, Phyllotreta cruciferae
taccggaacttccattatgg

SEQ ID NO: 559 - DNA, 20 bp, Phyllotreta cruciferae
atactctttgccaacgtctt

SEQ ID NO: 560 - DNA, 20 bp, Phyllotreta cruciferae
cagttagctgctttagttgc

SEQ ID NO: 561 - DNA, 20 bp, Phyllotreta cruciferae
agacaccatcgaaaatgtca

SEQ ID NO: 562 - DNA, 20 bp, Phyllotreta cruciferae
acgaaacatcagtgaatcca

SEQ ID NO: 563 - DNA, 20 bp, Phyllotreta cruciferae
tgctggacaacgagattaaa

SEQ ID NO: 564 - DNA, 20 bp, Phyllotreta cruciferae
ggaaaccgaggacatgttat

SEQ ID NO: 565 - DNA, 20 bp, Phyllotreta cruciferae
gctattgagatttgcggatg

SEQ ID NO: 566 - DNA, 20 bp, Phyllotreta cruciferae
cagttcaaattggtgttgct

SEQ ID NO: 567 - DNA, 20 bp, Phyllotreta cruciferae
atggtaggtttagatgctgc

SEQ ID NO: 568 - DNA, 20 bp, Phyllotreta cruciferae
aagccatcgattcctacatc

SEQ ID NO: 569 - DNA, 20 bp, Phyllotreta cruciferae
gaaagcttgggaagtagaca

SEQ ID NO: 570 - DNA, 20 bp, Phyllotreta cruciferae
ccgagtccacttcaagaata

SEQ ID NO: 571 - DNA, 20 bp, Phyllotreta cruciferae
acgcagtacaagaaatccaa

SEQ ID NO: 572 - DNA, 22 bp, Phyllotreta armoraciae
ggatccaattcctccttgcact

SEQ ID NO: 573 - DNA, 23 bp, Phyllotreta armoraciae
attctcgagaacatttcacttct

SEQ ID NO: 574 - DNA, 22 bp, Phyllotreta armoraciae
gagacctgtacgaacagactcg

SEQ ID NO: 575 - DNA, 20 bp, Phyllotreta armoraciae
ttcagcacaaacaccatttc

SEQ ID NO: 576 - DNA, 25 bp, Phyllotreta armoraciae
caatgtagattctttttggatgttg

SEQ ID NO: 577 - DNA, 23 bp, Phyllotreta armoraciae
agtaatggtcttgccggtaagag

SEQ ID NO: 578 - DNA, 20 bp, Phyllotreta armoraciae
ccgacacactgtaccttaaa

SEQ ID NO: 579 - DNA, 20 bp, Phyllotreta armoraciae
gttgcggaagttaaattcgg

SEQ ID NO: 580 - DNA, 20 bp, Phyllotreta armoraciae
gactttatggtcagggtgtt

SEQ ID NO: 581 - DNA, 20 bp, Phyllotreta armoraciae
ccttcctccgtaatgatacc

SEQ ID NO: 582 - DNA, 20 bp, Phyllotreta armoraciae
ggctggaagtgggaatctct

SEQ ID NO: 583 - DNA, 22 bp, Phyllotreta armoraciae
gatggataacacccaaagacgc

SEQ ID NO: 584 - DNA, 20 bp, Phyllotreta armoraciae
tgcagtctagcgtaacattt

SEQ ID NO: 585 - DNA, 25 bp, Phyllotreta armoraciae
gatggaagggcactctaagatgacg

SEQ ID NO: 586 - DNA, 20 bp, Phyllotreta armoraciae
atatccacgcgattagtagc

SEQ ID NO: 587 - DNA, 20 bp, Phyllotreta armoraciae
gcaatagctcctgtaggtac

SEQ ID NO: 588 - DNA, 20 bp, Phyllotreta armoraciae
ctttgtttccttgatctgcg

SEQ ID NO: 589 - DNA, 20 bp, Phyllotreta armoraciae
tgtttgttcatttttgggca

SEQ ID NO: 590 - DNA, 20 bp, Phyllotreta armoraciae
cctgtatgtaccagttacgg

SEQ ID NO: 591 - DNA, 20 bp, Phyllotreta armoraciae
tatatcaggagcgtcgtagt

SEQ ID NO: 592 - DNA, 20 bp, Phyllotreta armoraciae
gaggatttgatgtatcggct

SEQ ID NO: 593 - DNA, 20 bp, Phyllotreta armoraciae
ttttgttgctcttcttggga

SEQ ID NO: 594 - DNA, 20 bp, Phyllotreta armoraciae
catctcttcaaggggaactg

SEQ ID NO: 595 - DNA, 20 bp, Phyllotreta cruciferae
aatcagcattctatcgaccc

SEQ ID NO: 596 - DNA, 20 bp, Phyllotreta cruciferae
taatgtcctcactacctcgt

SEQ ID NO: 597 - DNA, 20 bp, Phyllotreta cruciferae
actttcacgttagccttgat

SEQ ID NO: 598 - DNA, 20 bp, Phyllotreta cruciferae
acggccatcttctaattgtt

SEQ ID NO: 599 - DNA, 20 bp, Phyllotreta cruciferae
tgcctacacactgtacctta

SEQ ID NO: 600 - DNA, 20 bp, Phyllotreta cruciferae
tggttgcggaagttaaattc

SEQ ID NO: 601 - DNA, 20 bp, Phyllotreta cruciferae
gcagaactttacgatcagga

SEQ ID NO: 602 - DNA, 23 bp, Phyllotreta cruciferae
ttagccttcgtaaaatttgggca

SEQ ID NO: 603 - DNA, 20 bp, Phyllotreta cruciferae
agtggaaagcacgatgttaa

SEQ ID NO: 604 - DNA, 20 bp, Phyllotreta cruciferae
tcaccttttcctctaacagc

SEQ ID NO: 605 - DNA, 20 bp, Phyllotreta cruciferae
tagtctagcgtaacacttgc

SEQ ID NO: 606 - DNA, 20 bp, Phyllotreta cruciferae
agacttgtgccttagacaag

SEQ ID NO: 607 - DNA, 20 bp, Phyllotreta cruciferae
cgtctcctatgaacatctgg

SEQ ID NO: 608 - DNA, 20 bp, Phyllotreta cruciferae
ttttagcagcaggtttaacg

SEQ ID NO: 609 - DNA, 20 bp, Phyllotreta cruciferae
ctttgtttccttgatctgcg

SEQ ID NO: 610 - DNA, 20 bp, Phyllotreta cruciferae
tgtttgttcatttttgggca

SEQ ID NO: 611 - DNA, 20 bp, Phyllotreta cruciferae
cctgtatgtaccagttacgg

SEQ ID NO: 612 - DNA, 20 bp, Phyllotreta cruciferae
gggaatattaaccctcgacc

SEQ ID NO: 613 - DNA, 20 bp, Phyllotreta cruciferae
gaccaaacgacgtatctaca

SEQ ID NO: 614 - DNA, 19 bp, Phyllotreta cruciferae
gattccccttcggttaacc

SEQ ID NO: 615 - DNA, 20 bp, Phyllotreta cruciferae
ttgcatctcttcaaagggaa

SEQ ID NO: 616 - RNA, 2334 nt, Phyllotreta armoraciae
augacuacuuacgaggaauauauucagcaaaaugaggaccgagaugguauccguuuuacguggaacguguggccguccagcaggauugaagccacucguuuggugguaccauuagccugucucuaucagccuaucaaagaacgaguagaucuuccuaccauacaauacgauccaguauugugcacaaggaacaacugcagggcuauuuuaaauccacugugucaagucgauuaucgagcuaaauuauggguuugcaacuucuguuuucaaaggaauccauuuccucaacaauaugcagcuaucucugaacaacaucaaccugcugaauuaaugccaauguucucgacuauugaguacacaauuaacagaguucauuguuuaccucccauauuccuguauguugucgauacuugcauggaugaagaagaauuagguucucuuaaggacucguugcaaaugucguugaguuugcuaccgcaaaacgcuuugauuggccugauuacauuuggaaaaaugguucaaguucaugaauuggguacugaaggugucagcaaaucguacguauuccgaggaacuaaagaucuuacggcuaaacaaguucaggaaauguuggguauugguaaagucgcaauggcucaacaacaaccacaaccgcaacaaccuggacaaccuaugagaccaggacaaccucaaucugcaccugucccaccugguagcagauuccugcaaccuauuucaaagugugauaugaauuuaacggauuuaauaggagaacaacagaaagauccuuggccugugcaccaagguaaaaggccacugagaugcacugguguugcauuaucgauugcuaucggcuuauuggagugcacuuaugcaaauaccggagcuaggguuaugcuuuuuguuggggguucuugcucacaaggcccaggucaaguuuugaaugacgauuugaaacaaccuauuaggucccaucacgauauccaaaaagauaaugcaaaauauaugaaaaaagcuauuaagcauuacgauacuuuagcgaugagagcagcgacuaauggucacugcauugauauuuauuccugugcacucgaucaaacugguuuaauggaaaugaaacaaugugcaaauucuacagguggucacauggugaugggagacucuuuuaauucaucgcuguucaaacaaacauuccaaaggguguucacuagagaucagaaaaacgauuugaaaauggcuuuuaauggaacauuagaagugaaauguucucgagaauuaaaagugcaaggaggaauuggauccuguguaucauuaaacgucaaaagucaacuggucuccgacacagaaaucggcaugggcaacaccgugcaauggaaaauguguacacucacuccaagcacuacgauggccuuguucuucgaagucgucaaucagcaugcugcgccaauuccgcaaggaggaagaggcugcauacaauucauuacucaauaucaacacucaaauggucaaagaagaauuagagugacgacaguagcucgaaacugggccgaugccacuacuaauauucaccacaucagcgcugguuucgaucaagaagcugcagcuguaauuauggccagaauggcuguuuacagagccgaaucugaugagagucccgacguucugagaugggucgauagaaugcugauucgauugugccaaaaauucggagaauacaauaaagacgaugcugguucauucagauugggucaaaacuuuagccuauauccgcaauucauguaucaccuaaggagaucucaguuccugcaaguuuucaauaauucuccugaugaaacaucguucuaucgacauauguugaugagagaagaucuuacucaaucauugaucaugauccaaccaauuuuguacaguuacaguuuuaacggcccucccgagccugugcuauuagauacgaguuccauacagcccgauagaauauugcuuauggacacguuuuuccaaauuuugauauuccacggggagacuauagcucaauggagaaauuugaaauaucaagacaugcccgaauacgagaacuuuaggcaauuauugcaagcaccuguugaugaugcucaagaaauauuacaaacaagguuuccgaugccgagauauauugacaccgaacaagggggaucccaggcuagauuuuuauugucgaaagucaauccgagucagacucacaauaacauguauucauacggaggggacgccggcgcuccaguuuuaacagacgauguaucacuucaaguauucauggaucauuugaaaaaauuggcaguuucguccacggcuuga

SEQ ID NO: 617 - RNA, 2721 nt, Phyllotreta armoraciae
augccacuucgguuagacauuaaaagaaaguuaacagcucguucugaccgggugaaaugcgucgaccuccauccuacggagcccuggaugcucuguucgcuuuacagcggaaacauaaacguauggaaucaugaaaaucagcagcucguuaaaacguucgagguaugcgaucugccagugagagcugcgaaauucguaccgaggaaaaauuggauuguuaguggaucugaugauaugcaaauuagagucuuuaauuacaauacauuggaucgcgugcaugcuuucgaagcucacucugauuauguucgaucaaucguuguucauccuacgcagccuuauaucuuaacaaguagcgaugauaugcuaauuaagcuguggaacugggagaaagcaugggcaugucaacaaguguucgaaggccacguucacuacaucaugcaaaucgccaucaaccccaaagacaacaacacauucgccagcgccucguuggaccgaacgauaaaagucuggcaauugggcgccucuacggcgaacuucacgcucgagggucacgagaagggcgucaauugcgucgauuacuaucacggcggcgacaaacccuaccugauaucgggcgcugacgacagauuggucaaaaucugggauuaccaaaacaaaacgugcguucaaacgcuggaagggcaugggcaaaacgugaccgccguuuguuuccauccggaauuaccgaucgcucucaccggcagcgaagacgguacggucagaguguggcacgcaaacacccaucgauuagagagcaguuugaacuacggcuucgaacggguguggaccauuuuuugcuugaaaggcuccaauaaugucgcucucgguuacgacgaaggcagcauucucguuaaagucgguagagaagagccggccgugagcauggacgcgagcggagggaaaaucaucugggcuaggcauucggaguuacagcaggccaaucugaaagccuuacccgaaggagcugaaauaagagacggggaacguuugccggucuccaucaaagauaugggcgcuugcgacauuuacccucaaacuauucagcacaaucccaacggccgguucgugguuguuugcggcgauggagaauacaucauuuacacugccauggcgcucaggaacaaagccuucgguagcgcgcaggaguucguuugggcgcaggauuccagcgaauacgccaucagagagucgggaucuaccaucagaauauucaagaacuucaaagagaagaagaauuuuaaaucagacuuuggagcugaaggcaucuacggugguuaucuguugggcguaaagucuguauccggauuggcuuucuacgauugggaaacucuggauuugguuagaaggaucgaaauacaaccucgcucgauauacugguccgauagcgguaaacuaguuuguuuggccaccgaggacaguuauuucauacuaucuuaugacguugaugaaguucagaaagcgagggauaacaaccagguggcagaugauggaguggaguccgccuucaauguccuaggugaaguaaacgagucuguucguacaggucucuggguaggagauugcuucauuuacacgaacgccgugaaccguaucaauuacuucguuggaggugaauuggugaccaucgcacaucucgauggcccauuguacgugcugggcuaugucccgaaggacgauagacucuauuuggucgacaaagaauugagaguggucaguuaucaguugcuucuuucggucuuggaauaccaaaccgccguuaugagaagagauuucucgacagccgauagaguguugccuucgauuccaaaggagcacagaacgagaguagcucauuucuuagaaaagcaagguuucaaacaacaagcucuggccgugaguacugauccugagcacagguucgaacuggccgucgcuuuggaggauuuaaauaccgccaagaugcuggcucaggaagcuaacaauccgcagaaauggagucagcuggccgauuuggcggcauccacgaauaaucucguauuggccaaagagugcaugcagaaagcccaagauuauggcggguuauuacucuuagcuaccaguucuggagaugacgagguagugagaacauuaggcgaagccacggaagccgagggcaagcauaacuuggcauucuuaucccauuuauuagucggagacuugaacaaauguuuggauauuuugauaagcaccgguaggcuucccgaagcugcguuuuucgcaaggucguaucuucccgauaaaauauccgagguaguggaacuguggagggcucaauugucgguuacuaaucagaaagccgggcaaaguuuggcggauccuaaagauuacgacaaccuguuucccggucuucaggaagccauugcggcgcagaaauauuuggaacagaacaguccuggaaucauaccggcugcuguggccgccaccguuacgccaaaucaagaaagaaacgucauagcagaaguggaggcgaaggucaaagguggccuugguguauugccgaacacaucgcuuccuucgguuaugucgccaagugaacagaugaagaaacucucgauuacucaagaugaugacgauuuggauuuggaccuugauggagugaacauugaugaaaauaucgauacaacggauaucaauauagaugaagaugacuuguuaagugauuga

SEQ ID NO: 618 - RNA, 2871 nt, Phyllotreta armoraciae
augacggcggucgaacagcccuguuacacauuaauuaauuuaccgaccgauucggagcccuacaaugaaaugcaauugaaaauggaucuugaaaagggagaagucaaaguaaagauaagggcuuuggaaagaaucauacacaugauauuggcaggcgagagauugcccaacggauuccugaugacaaucauacgaaacguucugccccuacaagaucaccuugccaagaagcuuuugcucauuuuuugggaaaucgugccgaaaaccaccgccgacgguaaauuacugcaggaaaugauccuagucugugacgccuacagaaaggaccugcagcaccccaacgaauuuuugcgaggaucaacauuaagauuucuaugcaagcuaaaggagcccgagcuguuggagccucugaugcccagcauucgaauuugccucgagcacaggcacagcuacguuagaaggaaugcuguucuggcaauuuuuacgauuuacaagaauuuugaauuucucauuccugacgccccugaauugauuucuacuuaccuagacggcgaacaagauaugucuugcaaaagaaaugcuuuucuuaugcucuugcacgccgaucaagaucgagcucucacuuaccuauccaauugcuuagaucaagucgcuucguuuggggauauccuacaguugguuaucguugaauugauauacaaagugugccacuccaacccuaccgaaagaucccgguuuauucgaugcauauacaauuuauugaauucgagcaguccugcuguuagguacgaggccgccgguacucugauuacuuuguccagcgcuccgacagcuauaaaagccgccgccaguuguuacaucgaauugaucauuaaagagagcgacaacaaugucaaauugaucguuuuggauagauugauugccuugaaggaacaucccagccacgagaggguccugcaggacuugguuauggauauauugagagugcuaucggcuccugauuuggaagugcgaaagaaaacgcuuaauuuagcgcucgaauuggugucgucucguaacgucgaagaaaugguguuugugcugaagaaggaggugucaaagacuguggauagcgaacacgaagacaccgggaaauacaggcaauuguuggucagaacauugcacucuugcugcaucaaauuccccgauauagcugcuacgguuauucccguucugauggaauuccuguccgauagcaacgaauuggcugccaccgauguguugcuauuuuugagggaagccauccagaaauucgauaauuuggagccgcucauuaucgagaaauuauuggagacauucaaagacaucaaaucugugaaaguacaucgagcugcucuuuggauauugggcgaauacgccacgucgacuggcgacauagaagccgucaucaaagagaucauucaaaccuuaggcgaaugcccauuguuggaaacugagcagaagauuauaucugguaaugcagacgaaagugcaccgguucaugcaccggcuggagcuaccacuuugguuacuucagauggaacguacgccacucagucugcuuucaacguguccagcaaaucgacgaaagagaagagaccuccauugaggcaauaccugauggacggagacuuuuucaucgcugcuucucuggccucuacuuugaccaaacuggcuuugagauauggugaaaacguuuccgcuuccgauaggaauaaauucgacgcugaaguuaugcuuauuauggcuggaauuuugcaucuaggcaaaucagguuugcccguaaaaccgauaaccaacgacgacaacgaucacauucucuucugccugcgcgugcuauccgaucgaacggagcccgucauccaaguauucucgagccucugccgcaacgcccucaacgauaugcugcuggcgaaggaaaccgaagaggugaccgaucaaaaaucgcgggaaaaaucucgagcggccguccaaaccgacgacgccaucaccuucgugcaacuggaguccgaucgaagcggggagcucggcgaaaacgucuucgaaaccucccugucccaagcccuuaugggcgguaaaacgggacaauccgacucgacuaucggcucgagcaaacugaacaagaucgcccaguugacagguuucucggaucccguuuacuccgaagcauaugugcauguuaaucaguacgauaucguacucgacgugcugguggugaaccaaacgagcgacacgcugcagaauugcacgcuggaacuggccacuuugggggauuugaagcugguagagaagccgcagcccgucgugcuggcgccgaaggacuucugcaacaucaaggcuaacgugaagguugccucgacagagaacgguaucauauucgguaauaucguguacgacgugacgggcgcugcuucagauagaaacgucgucguuuugaacgacauucacaucgauauuauggauuacauuguuccggcaucgugcaccgauucagaguuuaugaggaugugggcugaauucgaaugggaaaauaaggugacggucaauacgccgcugacggaucucaacgaguaccuggagcaucugcugaagaguacuaacaugaagugucugacgccugagaaggcgcucggagggcaaugcggcuucauggcggccaauauguacgcaaaaucgaucuuuggggaagacgcuuuggcgaauuugagcaucgagaagccguuuaacaagccggacgcgccagucgccggucacauuagaauucgggccaaaagucaggguauggcuuugaguuugggcgacaaaaucaacaugacgcagaaggggacgcaaaauaaggugguugccgcguaa

SEQ ID NO: 619 - RNA, 819 nt, Phyllotreta armoraciae
gaagguaucccaccagaccagcagagauugaucuucgcuggaaaacaacuagaagauggccguacucuuucugacuauaacauccaaaaggaaucuacucuucacuugguuuugagacuucgugguggaaugcaaaucuucguaaaaacucuuaccggcaagaccauuacucuugaagucgaaccaucagacaccauugagaaugucaaagcuaaaauucaggacaaggaagguaucccaccagaccagcagagauugaucuucgccggaaaacaacuagaagauggccguacucuuucugauuacaacauccagaaggaauccacucuccacuugguuuugagacuucgugguggaaugcagaucuucgugaaaacuuuaaccggaaagacuaucaccuuggaagucgagccauccgacaccauugagaaugucaaagccaaaauucaggacaaggaagguaucccaccagaccaacagagauugaucuuugccgguaagcaauuggaagauggccguacucuuuccgacuacaacauccagaaggaaucuacucuucacuugguuuugagacuucguggugguaugcagaucuucguaaaaacucuuaccggcaagaccauuacucuugaagucgaaccauccgacacaaucgagaauguuaaggcuaaaauucaggacaaggaagguaucccaccagaccagcagagauugaucuuugcugguaaacaacuugaagauggccguacucuuuccgauuacaacauccaaaaagaaucuacauugcauuugguacuccgucuuagaggaggacaguaa

SEQ ID NO: 620 - RNA, 603 nt, Phyllotreta armoraciae
auggaaugccuacucgggauuaaauucgacgauuucguuuuaguugccgccgauaugacugcggcccaaagcauaauuguuaugaaaacagacgaaaauaagcuguuuaaauugucuaacaagcuuguuauggcuguaucgggagagucuggugauacuacccaauuugccgaguauauugcuaagaauauucagcuguauaaaaugagaaauaccuacgaacuuagcccaucggaagcagcaucguuuacucguaggaaucucgcugaugcucuuagaagcaggagucccuaucacguaaauuugcuacuagcuggauacgacgauaaagaaggcccucaauuguacuacauggacuauuuggcgucgaccauuaaaguuaauuaugcugcucacgguuacggaggcuucuucucguuauccaucauggauagaaacuacaucaaaucucugagcagagaagaaggcuacgaguuguugaaaaaaugugugaaagaaguucagaaaagauuaaucaucaauuuacccaacuuuaagguacagugugucggcaaagaugguauaacagauuugcccgauaucacgcccaaggauuuggcuuaa

SEQ ID NO: 621 - RNA, 556 nt, Phyllotreta armoraciae
auggcggacgaugaggaaaagaagagaaaacaggcugagaucgaacgcaaaagggcugaggugagggcucgcauggaagaggccuccaaggcgaagaaggccaagaaagguuuuaugaccccugaaagaaagaagaaacuuagguuauuguugagaaagaaagccgccgaggaauuaaagaaggaacaggaaaggaaagcggccgaaagaagacgcaucaucgaagagcgcuguggaaagcccaaauugaucgaugacgccaaugaagaacaacuuaagaguauuuccaaaauguaucacgagagaauuugcaagcuggaagaccagaaauucgauuuggaauaucuagucaaaaagaaagauauggagaucgcggaauugaacagucaagugaacgaccucagaggaaaauucgugaaacccacguugaagaagguguccaaauacgagaacaaauucgccaaguugcagaagaaggccgccgaauuuaacuuccgcaaccaacucaaaguggucaagaagaaggaguucaccuuagaagaagaagacaaagaga

SEQ ID NO: 622 - RNA, 716 nt, Phyllotreta armoraciae
augauuuaggaaauggcguuaugagguuuucaagaaccaagauguuccacaagaaggcuuuauauaaauuuauugguaaaaaagucaaggcuaccaagaagccacagaagccucacguuaucgaaaaaccaauuaacggagaaaagaacggaggaaaaagauuugucuuagucaagaaacguagggcuuacuauccuacucaagacaagauuaagccgaggccugcgaagaaguccuucugccagcacaaacguucacuuagaacuaccauuacacccgguacuguucuuauuuuguuggccgguucccacaagggcaagaggguaguuuuccuuaaacaacuuuacucuggucuucuacuuguuacugguccguuuucaauuaaugccuguccuuugagacguauuagucaacgauacguuaucgcaacaucuaccaaaaucgaugucagcgguauuaaaguucccgacaccuuuaacgaugacuauuucgcaaggaaacgcgucaagagggcaaagaaagaagaaggugauauuuuccagaccaagaaagagguuuacaaaguaagugaggaaaggaaaaaggaccagaaggaaaucgacgcgcaggugaucgcugcgaucaaaaaacacccugaccauaaaguccuccaagccuauuuaucaucuaugugggguuugagaucgucucaauauccucacagauugaacuuuuag

SEQ ID NO: 623 - RNA, 512 nt, Phyllotreta armoraciae
guuauaggagccgauucucguacaaccacuggggcguacaucgcaaacaggguguccgauaaacuaacgagaguaaccgaucacauuuacugcugccggucagguucugcugccgauacggaggccaucgcagacaucguaggcuaccauuugaacuuccacgggauggaauugggcgaagagccgagcguagaagugggagcagccauauucaaggagcugugcuacaacuacagggacucucugauggccggcauacucguagccgguugggauaagaagaaaggcggccagauauauuccauuccgaucggcgggaugugcgugagacaggaagugucgaucgguggauccgguucgagcuacguguacgguuacauggacgccaauuacaaaccgaaaauguccaaagaagauugcguuaaauucgucacuaauacuuuggcucucgcuaugucuagagaugguucuuccggugguguaaucagauuagguaucauuacggaggaagg

SEQ ID NO: 624 - RNA, 747 nt, Phyllotreta armoraciae
auggcagggaaaggagacggcaaaggcgaggcgaguauacucaaauuggaaaaucagauugccgucaucaaauacgugauacucuuugccaacgucuugcaaugggcccucggcggcgcaaucuuugcccuuugccuuuggaugagguucgaggagggcauccaagaauggcugcaaaaauuggauuccgaacaauuuuacaacggaguuuauguacuuauagucgcuucgcugaucgucaugauuguguccuuucugggauguauuagugcccugcaggagaauacggugacccuuuuggccuacaucggcacgcaaguucugagcuucauauucgguuuagccgggucggcuguucuucuggauaacagcgccagagauucccacuuccagccgaggauucgggagagcaugcgacgucuuaucaugaaugcucaucacgagccauccagaguaacgcucgccaugauucaggaaaauaucggcugcugcggugcugacggagcagaagauuacuuggcgcugcaacagccauuaccgagccaaugcagggacaccgucaccgguaaucccuauuuccacggaugcgucgacgagcucacgugguuuuucgaggaaaagugcgccuggauagccgcauuggccaugugcauuugcuucuucaacguuuuuagcaucguacuuuccacgguucuuauacaggcuuugaagaaggaagaagaacagucagauacuuacaggaaauaa

SEQ ID NO: 625 - RNA, 3018 nt, Phyllotreta armoraciae
augaauauuacuucagcugcggggauuauaucccuuuuagaagaaccaagaccagaacucaaaguauucgcguuaagaaaacuagauuccauagucgaugaauucuggccagaaauuucagaagcuauugagaagauagaaauucugcacgaagauaaaguauuccaacaacaucaguuagccgcuuugguugcuaguaaaguuuacuaucaucugggggcauucgaagauucauuaacguacgcuuugggagcuggcgaucuguucgauguaaaugcuagaacagaauacguugagaccacacuugcaaaauguaucgacuucuauacacaacaacgcauagcuuuggcggaagguucaaccgaugcgaaaccuauagauucaagacucgaagcgaucguaaaccgaauguuccaacguugcuuggacgacgggcaauaucgccaggccaugggucucgccuuggagaccaggagaauggacaucuuugaauuauccaucacacaagccgaugauguuaucaguaugcuuaccuacgcuuuccaaguggcgaugagucuaauucagaaucgagcauuucgcaauaccgucuuaagaucucuaguuggcuuguaccgcgguuuaacuacuccggacuacguuaacaugugccaaugucugaucuucuuggacgauccgcuaucaguugcggaaauuuuggauaaauuagucucugguaaagaagaguccgaauugauggcuuaccaaauagcuuuugaucucuaugaauccgcaacgcaacaguuuuuggaacgaguuuuggucgcgcuuagagcuaccgcucccauaccuucgcuauuagaggaaaaggucaaaucuaaaagcgccgaacaaucuaguagcacuucugcagaggcccccaaagauccuguuagcagugaaacuaaaagcgaggcgaaagaagaaaagucuauugagggauugacugagagugaaaaggaacaucaaaagcgaaucgaaaaauugcauaccaucuuaucgggcgaaguaucgauagaacuucaucuucaauuucugauuagauccaaccacgccgaucuucuuauucugaagcaaacgaaagaaacgguucgaguuaguauuugucacacugcuacagucaucgcuaacgcuuucaugcacagcgguacuaccagcgaucaauuuuuaagggauaauuuggaauggcuagccagagcaacgaauugggcgaaacuaacagcaacagcgucuuuggguguuauccaucgaggacaugaacaagaggcuuugacucucaugcaaagcuauuuaccgaaggaaguugggccgaguuccggauauuccgaaggcggcggucuguacgcucuuggucucauucacgccaaucacggugcuaacauaaucgauuaucuucuuggucaacuaaaagaugcucagaacgagaugguuagacacggcgguuguuugggacucgguuuggcugcuaugggaacacacaggcaagauguauaugaacagcucaaguucaaucucuaucaagacgaugcuaauaccggagaggcugccggaauugcgauggguaugguuaugcugggauccaguaauccaacuacuauuauggacaugguagcguacgcgcaagagagccaacacgaaaagauucuucgcgguuuggcggucggcaucagcuucaccauguacggucgauuagaagaagcugauaccuuaauacaacagcuuacuucugauaaggauccgauccugagaagauccggcauguacacauuagcuauggcuuauugcgguacaggacauaaccaggcgaucagaaaauuauuacacgucgcgguuucugauguaaacgaugacgugagaagagcagcagucacagcgcucgguuuccuguuguucagaacccccgagcaaugucccagcguggugucccuuuuggcggaaagcuacaacccgcacgugcguuacggggccgccauggcgcugggcauagccugcgccggcacgggccuucgcgaggccaucgcccugcucgagcccauggugauguucgauccugugaauuucguccggcagggggcccuaaucgccucggcgaugauccucauccagcagaccgagcaaacgugcccgaaggucagcuucuucaggcagaccuacucucaggucauuuccaacaagcacgaagacgucauggccaaauucggugccauuuuggcgcaagguauaaucgaugccggcggcaggaacguaacucuaucguuacaauccagaacgggccacaccaacaugcuggcugucguugguacauugguguuuacgcaauauugguauugguucccucugucgcauugccuggcuuuagcuuucaccccgacgugcgugguagcguugaauacccaacuaaagaugccuaaauuggaguucaaaucgaacgcgaaaccgagcuuguacgcguauccagcgcccauggaggagaagaaacgcgaagaaagggaaaaagucaccacggcuguauuaagcauagccgcgaggcaaaggagaagggaucacgagaggaagcaucgcgaugagaaaauggacguggacgaagauaaagacgauaagaaaacggaaaaggaggaaaaagagaagaaauccgaagacaagaaagaggagaaaaaguccgaugauaaaaaaacggacgauaaaaaagcgacgucgucgagcgacgacaagaaagauaagaaagaugagaaggaggagaagaaaaaggaacccgagccuaauuucgaaauccugcaaaaucccgcgaggacuaugaggcaacaacugaaagugauuacgcuaaacgauaacucacaauacguugcaaugaaggacguuucuaucggaggacuuauuaugguucgcaauuuaaaaccuggagaagaagaguugguggaaccuguagcagcauucgguccaaagggagaugaugaaaaggaaccagaaccaccagaaccauucgaauggaccgaggauuag

SEQ ID NO: 626 - RNA, 387 nt, Phyllotreta armoraciae
augcaaauuuucguaaaaacucucaccgguaaaacuauuacccucgagguagaaccaucagacaccaucgaaaaugucaaagcgaaaauucaagauaaggaaggaauuccucccgaccagcagcgauugauuuuugcagguaaacaacucgaagauggccguacccuuucagauuacaacauccagaaggagucuacucuccacuuggugcugcguuugagaggaggaaucaucgagcccucucugcgucuuuuggcccaaaaguacaauugcgacaagaugauuugccgcaaauguuacgcuagacugcauccgagagcuacuaauugcaggaaaaccaaguguggacauaccaacaacuugcgccccaagaagaagcugaaguag

SEQ ID NO: 627 - RNA, 2640 nt, Phyllotreta armoraciae
augagcucuuguaaaagagagaaaaaggaggaagaagauggaguuggaaauauauuccaaaacaucgaaaaaacuacuguuuuacaagaagcucgaguguucaaugaaacauccgugaauccaagaaaauguacccuaauucuuaccaaauuacuuuaccuacuaaaucagggggaagcuuuaaacguaaaagaagccacagauguuuucuuugcaaugacuaaacuauuccagucaaaagacguaauccuucggagaauggucuaucuaggaauuaaagagcuaagcucgaccgcagaugauguaaucauagugacuucgagccucaccaaagauaugacgggcaaagaagacauuuacagagcagccgcuauacgugcuuuaugcagcauuaccgaugcuaccaugcugcaagccaucgaacgcuacaugaaacaagccaucgucgauagaaauucugcugucaguucggcagcauuggucaguucuuugcacaugaccaaaauggcaccugaagugguuaagagauggguaaacgaagcgcaggaagcuauuaauagugauaaugugauggugcaauaucaugccuuggggcuccuguaucacaucagaaaaacagauaggcuggcuguuacaaaauuaauagcuaaacuaaccagaacuacucugaaaucuccauacgcuguuugcaugcucaucagaauaauagccaagcuacucgaagaagaagauucuggcaaugauuuucccuauuuugauuucaucgaaucuugccuaaggcacaaaucugagaugguaguuuacgaagcagcccacgccaucguuaaucucaaagguaccacuagcaaagaacuggcgccggcugugagcguauuacaauuguucugcgguucaccgaaggcuacuuugagauucgccgccguuagaacucugaaucaaguggccauaucccauccggccgcugugacggcuuguaauuuggauuuggagaauuugauuacugauucuaaucgaucgauagcuacucuugcuaucacuacuuuauugaaaacuggugcugaaucguccguugaucgucuuaugaaacaaauagcgaguuuugugucugaaauuagcgaugaauucaaaguuguaguaguccaagcgaucagagcgcuggcucuuaaauucccucgaaagcacaacacucucaugaacuuuuuaucggcuaugcuaagagacgaaggcgguuuggaauacaaagcuuccauugcagacaccauaaucacuauaaucgaagauaaucccgaagcuaaagaaucugguuuggcucaucugugcgaguuuauugaagauugcgaacacguuucuuuagcuguuagaauauugcaucuguuggguagagaaggaccgaaaaccaagcaaccuucuagguacauccguuucaucuacaaucgcgucaucuuagagugcccuuccaucagagcagccgcuguuucugccauggcucaauucggagcuucuuguccugauuuguuggaaaauauucaaguacuacuagccagaugccaaauggacucugacgaugaaguuagagacagagccacuuauuacagcagcauacuuaacaaaaacgauaaaaacuuguacaacaauuuuauccuagauacuuuacagguaucuauaccaucguuagaacgcucgcugaaagaguacacgcagaacccuacgaaucaaccguuugauauaaaaucaguuccgcugcaagucggcccgucuccggacgagcgcgagaagaagcacaaauccgaaggcaugcugacgucgcaagggcccgugcgcccgccgcccguaucccgagaagagaacuuugccgagaaacugucggccauaccgggcauccagcagcucgguccgaucuucaagagcuccgaagugguggagcugaccgaauccgagacggaguacuucgugcggugcaucaagcauugcuucgcccaucacgucgugcugcaguucgauugccugaacacgcugcccgaucaacugcuggaggacgugcggguggaguuggagccgagcgaaggguucgaauugcugucggugguaccgugcaagcagcuacauuauaacgagaccaaucacaccuaugccauuuugaaguuccccgacgacgauuugccuaguugcguugguacuuucggggcgguguugaaguuuaucguuaaagauugcgauccuacgacuggcauucccgauagcgacgaagguuauaaugaugaauacauacucgaagacuuggaaauaacguugggcgaucaaauacaaagagugagcaaaguuaauuggggcgcugcuugggaaacggcugcugagaguucugucgaaaaggaggauacguauucucucaguucgaugaauacguuggacgaagcugugaaaaauaucgugcaguuccuuggauugcaaccggccgaaagaacugauaaagugccugaaggcaagagcacacauacgcuucuacuaucaggagucuuuagaggagguaucgauauuuugguaagagcuaaacuugcuuuagcagaugguguuacaaugcaauugacuguaagaucacccgacgacagcauagcugaacuuauuaccucuucuguagguuaa

SEQ ID NO: 628 - RNA, 1284 nt, Phyllotreta armoraciae
augucgaccuuagaagacaaaucgauuugggaagacggcgaagaagcgcucggcgaggagauuuuaagaauguccaccgacguuaucauaggucauacgcgauugcuggacaacgagauuaaaauaaugaagagcgaagugaugcgaauaaaucacgaacuacaggcgcaaaacgagaagaucaaagaaaacaccgagaaaauaaaagugaacaaaaccuugccuuacuugguuucgaacguaauagaacuguuggacguagauccccaagaagaggaagaggacggugcaguagucgauuuggauucucagagaaaagggaaaugcgcuguaguuaaaacguccacgagacagaccuauuucuuacccgugauaggacuagucgaugaggagaaacuaaaaccgggagaucuagugggagugaacaaagacucuuaucuaauuuuggaaacauuacccgcagaguacgaugccagagucaaggccauggaagucgaugagaggccuucugaacaguauuccgauaucggagguuuagauaaacaaauacaggaacuuauagaggcuguuguacuaccuaugacucauaaagacaaguucguuaauuugggaauucauccuccuaaagguguucuacuuuacggccccccagguaccggaaagacccuccuagccagagccugcgccgcccaaacuaaaucaaccuuucucaaacuggccgguccucaguuaguccagauguucauaggcgacggcgccaaguuaguccgggacgccuucgccuuggccaaagagaaagcccccgcuauaauauucaucgacgaauuggacgccaucgguacgaagcgauucgacucugagaaagccggcgacagggaaguccaaagaaccauguuggagcugcugaaccaacuggacgguuucaguucgaccuccgacaucaaagucauagcagcuacuaaucgcguggauauccuggaucccgcucugcuucgauccggacgauuggacaggaagaucgaauucccgcaucccaacgaagaggcgagggcgagaaucaugcagauucacuccagaaaaaugacggucaacccggacguuaacuucgaggaauuggccaggucuacggacgacuucaacggggcucaguguaaggcugugugcgucgaagcugguaugaucgcucucagacguaacgccacggccgugacgcacgaggacuacauggacgcuauuauggaaguucaagcuaagaaaaaggcgaaucuuaacuauuacgccuaa

SEQ ID NO: 629 - RNA, 660 nt, Phyllotreta armoraciae
augaguuuuuuuacuaaaauauucggaggaaaggagaaagauacggguccuacgcccggagaagcuauccaaaagcucagggaaaccgaggacauguuauauaaaaaacaggaguuuuuagaaaagaaaauagaggaauacacauuaguagccaaaaaaaaugcaucaaagaauaagagaguugcgcugcaagcgcucaaaaagaaaaaacgauuggagaaaacucaauuacaaauagauggaacacucacuaccauugaaaugcaaagggaggcccucgaaggggccagcaccaacacagccgucuuagacucuaugaagaaugcugcugaagcccuacagaaagcacacaaaaacuugaauguugaugauguccacgauaucauggaugacauagcugaacagcaugacaucgccaacgaaauuacuacugcuauuagccagccgguuggcuucaacgaugauuuggaugaggaugaauuagaaagugaacuagagaagcucgaacaagaaggauuggaggaagauuuacugaaaguucccggcccaaccgaauuaccugcuguaccuacaggagcuauugcuaagccuguuaaaccugcugcuaaaaaaguggaggaugaugaugauaugaaggaauuggaagcuugggcuucguaa

SEQ ID NO: 630 - RNA, 609 nt, Phyllotreta armoraciae
augaauccugaguaugauuacuuauucaagcugcuucucaucggcgauucuggaguaggaaaaucguguuugcuauugagauuugcggaugauacuuauacggaaaguuauauuaguacuauuggaguagauuuuaaaaucagaacaaucgacuuagauggaaaaacgauuaaauugcaaauuugggauaccgccggacaggaacgauuuagaacuauaacaucgaguuacuacaggggcgcgcacggaaucaucgucguguacgauugcacagaccaggacuccuucaacaacgugaaacaaugguuggaggaaaucgaccguuacgcaugcgacaacgucaauaaauuacuuguagggaauaaaagugaucugacgacuaagaaagucgucgauuucaauacggccaaggaguacgcggaucaguugggcguaccauuuuuggagacgucggcgaaaaacgccaccaacguagagcaggccuuuaugacgauggcggcggaaauuaaaaaucgauuaggaccgccgaccgcggccgcagaucaaggaaacaaaguuagauucgaucaaagucguccuguugaaucgacuaaaucgggauguugcuga

SEQ ID NO: 631 - RNA, 651 nt, Phyllotreta armoraciae
auggcaacaaaucgaacugucaccgcccaaagaccaaauggcgcuacccaggguaaaaucugucaguucaaauugguguugcucggcgagagcgccgucgguaaauccagucuggugcugagguucgucaagggccaguuccacgaguaccaggagagcaccauaggggcugcuuuccucacgcagaccauuugcuuggacgauaccaccguuaaauucgaaauaugggacaccgcgggacaagaaagguaucacaguuuagcuccgauguacuacagaggggcgcaggcagcuauagugguguacgauauaaccaaucaagauacguucggcagagcgaaaacgugggugaaggagcuccagaggcaggccaguccgacgauugugauagcccuagccgguaauaagcaggauuuggcuaacaagcggaugguggaguacgaggaggcgcaaacguacgccgaugaaaaugguuugcuguucauggaaacaucggcgaaaacggcgaugaacguuaacgauauauuuuuagcaauagcuaagaaacugcccaaaaaugaacaaacaucuggucaagggggcagcgcccaaggcaggcgacuggcagaaggagaugcgggcgccaaggccccaggaaacugcugcaaguga

SEQ ID NO: 632 - RNA, 549 nt, Phyllotreta armoraciae
auggguaauguguuugcuaauuuauuuaaaggccucuucggcaaaaaggaaaugaggauauugaugguagguuuagaugcugcugguaaaaccacaauuuuauauaaacuaaaauuaggagaaauuguaacaaccaucccaacuauugguuuuaaugucgagacuguagaauauaagaauaucagcuucaccgugugggaugucgguggucaggauaaaauuaggccauuguggagacacuauuuucaaaauacccagggccuaaucuuuguaguggacagcaacgacagggaacguaucaccgaggccaaagacgagcugaugcguaugcuggccgaagacgagcucagggacgccguucugcugauauucgccaacaagcaggauuugccgaacgcuaugaacgccgccgaaaucaccgauaagcucggacuacauucguugcgcaaccguaacugguacauacaggccacgugcgccaccagcggagacggucuauacgaaggucuggauugguuguccaaucagcugaagaaugccaaucguuag

SEQ ID NO: 633 - RNA, 4607 nt, Phyllotreta armoraciae
acagacauuccucucugaacgguugccagaucaucaacuaccgcacggacccgaagcaaaacuggcugcuguuggugggcaucagcgcgcagcagucgcgcgucgucggcgccaugcaauuguacucggucgagcggaagugcucgcagccgaucgaaggccacgccgccucguucgccacguucaaaauggagggcaacccggagccgucgacgcucuucugcuucgccgucaggacgcugcagggcggcaagcugcacaucaucgaggugggccagaacccggccggcaaccagccguuucccaagaaguccguggacguuuucuucccgcccgaggcgcagaacgacuucccgguggccaugcaggucuccaccaaguacgacguuauuuacuugaucaccaaguacgguuacauucacauguacgacaucgagagcgggacuugcauauacaugaaccggauuucuagcgauacgauuuuuguaacggcuccucacgaaucuaccggugguaucaucgguguuaauagaagaggucaaguuuuaucgguaucugucgaugaggaaagcauuauuagauacauuaauacagucuugcauaacgcugaucuagcucuacguuuagcuacuagaaacaaucucgcuggugcugaagacuuauuugucaguaaauuccagaugcuuuuucaaaacgggcaauacgccgaagccgcuaaagucgcugccaacgcuccuaaaggaauccucaggacgccagcuacaauccaaauguuccagcaaguuccuacucaacccggccaaaacagcccccugcuacaauacuuugguauacuucucgaucaagggcaacuuaauagauaugagucauuggaauugugcaaaccggucuugcuucaaggacgcaaacagcucuuagaaaaauggcugaaagaagagaaauuggaguguucggaggaauugggugaucuggugaaacaggccgaucccacucuggccuuguccguguaccuuagagcaaacguuccggccaaggugauucagagcuucgccgaaaccgggcaauuccaaaagaucguccuguacgcuaaaaaaguauccuacacgcccgauuacguguuccuuuugcgacaagucaugcguaccaaccccgaucaaggugcugcuuucgccggaauguugguagccgacgaagagccucuagccgauaucaaucaaaucgucgauaucuucauggaacagaacauggugcaacaguguacagccuuucugcucgacgcuuugaagaacaacagacccaccgaagggcacuugcaaacaagauugcuggagaugaauuugaugucagcgccucagguggccgacgcgauucucggcaacaacauguucacgcacuacgaucgagcccacgucgcucagcucugcgagaaagcaggucuuuugcaaagggcccucgagcacuacaccgauuuguacgacaucaaacgggccgugguccacacucaccuguugccggccgauugguuggugaauuucuucggaacguugagcgucgaagacagcuuggaaugccucaaagcgaugcugaccgcuaacaucagacaaaaccugcagauuugcgugcaaaucgccaccaaauaccacgaacagcucaccacuaaggcucucaucgauuuguucgagagcuucaagaguuacgaagguuuguuuuauuuccucggcucgaucguuaacuucucucaagaccaggaaguccacuuuaaauacauacaggcugcgugcaaaacgggccaaaucaaagaagucgaacgcaucugucgcgaaucgaauugcuacaaugccgagcgagugaagaauuuccuaaaagaagcuaaacuaaccgaucaauugccgcuuauuaucguuugcgaucgauucgauuucguucacgauuuagucuuguaccucuacaggaacucguugcagaaguacauugaaauuuacgugcagaaagucaaucccagucgguuacccguggucgugggcgggcuuuuggacgucgauuguuccgaagacaucauuaaaaaucuaauuuugguaguuagaggacaauucucgaccgacgaauuagucgaagaagucgaaaagcgaaacagauugaaacugcuguugccuugguuggagagccguguucacgaaggaugcgucgagccugccacucacaacgcucuggcgaaaauuuacauagauuccaacaacaacgccgaacgguucuugaaagaaaaccaaugguacgauucucgcguugugggucguuacugcgaaaaacgcgauccucaccuggcuugcgucgcauacgaacgaggccaaugcgacagagaauugaucgcggugugcaaugaaaacucccuguucaagucugaggcucguuacuuggugcgcaggcgcgacggcgaauugugggcugaaguacuucaagaagcaaacccguacagacgucaguugaucgaucaaguaguucaaacggcgcuuagcgagacucaggaucccgaagauauuucuguaaccguaaaagcuuucaugacagcugacuuaccgaacgaauugaucgaauugcuggagaaaaucguuuuggauaacucuguguucucugagcacagaaaucuucagaauuuacuuauucuuaccgcaaucaaagccgaugcuacuagaguuauggauuacauuaaccguuuagacaacuacgacgcuccugauauagcgaauaucgcuauaaacaaucauuuguacgaggaagcuuucgccaucuucaaaaaguucgaugucaacacuucugcgauccaagugcucaucgaacaagucaacaacuuggaccgagcuuacgaauuugcugaacguuguaaugaaccggccguguggagccagcucgccaaggcccaacucaaccaggguuuggucaaggaagccaucgauucguacaucaaagcggacgauccuucggcuuacaucgacgugguggagaccgcuucgaagaacaacagcugggaggaucuggugcgcuaccugcaaauggccaggaagaaggccagagagagcuacaucgaauccgagcugaucuacucguacgccaagaccggccgguuggccgauuuggaagaguucaucagcggucccaaucacgcugacauccagaaaaucggcgacagaugcuucgaugauaaaauguacgacgcggccaaguuguuguacaacaacguuucgaauuucgcucgacuggccauaacgcuggugcaucugaaggaguuucaaggggcgguggacagcgcccgcaaggcuaacagcaccaggacguggaaggagguuugcuuugcuugcguagaugccgaggaguucagauuggcccaaaugugcggcaugcacaucgucgugcacgccgacgaauugcaggacuugauaaacuauuaucaagacagagguuacuucgaagaguugaucggucuguuggaggcugcccugggguuggagagggcccacauggggauguucaccgaacuggcuauauuguauucgaaauacaagccggcuaggaugcgugaacaucucgaauuguucuggucgcgcguuaauauccccaaagugcuuagagcagccgaacaggcgcauuugugggccgaauugguguuccuguucgacaaauacgaagaguacgauaacgccgugcuggccaugauggcgcauccuacugaagcguggcgcgaggggcacuucaaagacaucaucacgaaagucgcgaauaucgaauuguauuacaaggcgauccaauuuuaucucgauuucaagccgcuguuguugaacgaccuucugcuggugcuggcuccgagaauggaucacacgagggccguggcuuucuucgccaaaaccagccaccugcagcuggucaaauccuacuuacgaucuguccaaaauuugaacaauaaagcgaucaacgaggcucucaauucucugcuuauagaggaagaggacuuccaggggcucagaacguccauagacgcguucgauaacuucgauaacauagguuuagcccagagauuagaaaagcacgaauuaaccgaauuuagacgcaucgccgcuuaucuuuacaaaggaaacaaccgguggaaacagagcguggaguugugcaagaaagaccggcuguucagagacgccauggaauauacaucggagucuagaaaccaggaauuggccgaggaacuguuggcuugguucuuggacagaaaggcguaugacugcuucucugcuugcuuauaccacuguuacgaucugcuccgaccggacgucauucuggaacuggcuuggaagcacaacauaauggacuuugcgaugccguuccugauccaggugaccagggaauugaccucgaaagucgagaaauuggagcaaucggacgcucaaagacagagcgaggcggcggaggagacgaacaagccgaucaugaugcccgaaccccaacuuauguugacugcagguccuggcauggguauuccgcaacagccauacaugccucaacaaacguacgcccaagugggauaugcaccgcaaauggccuaccaagguuacccgggcauguaa

SEQ ID NO: 634 - RNA, 3672 nt, Phyllotreta armoraciae
auguugaccaaguucgaaaccaaaucagcaaggguaaagggacugucuuuccaucccaaaaggccauggauuuuagccaguuuacacaacgggugcauccaauuaugggacuaucgaaugugcacgcuuuuggagaaguucgacgagcacgacggacccguaagaggcauauguuuccacaaucaacagccccuauucguaucagguggcgacgauuacaaaauaaaaguauggaauuacaagcagaaacguugcauuuucacucugcucgggcauuuggauuacauucguacgaccauguuccaccacgaauaucccuggaucgugucagcauccgacgaccagaccaucagaauauggaacuggcaaucgagaacgugcauuugcguuuuaaccggccacaaucacuacguuaugugcgcuacuuuucauccgagugaggaucuacuguuaucugcaucguuggauucuaccguuagaguuugggauauuucuggacugcguaaaaagaacguuucacccggucccucgggccucgaagaucaccucaaaaaucccggugcuaccgagcuauucggucaagccgaugcagucguaaagcacguuuuagaaggacacgaucgaggagugaauugggcaucauuucaccccuuccuaccucuaauagcuuccggagccgaugacaggcaaauaaagcuguggaggaugaacgauucgaaagcuugggaagucgacacgugcagaggccauuacaacaaugugucuugcguguuguuccauccgagacaggagcugauuuuaucgaacggcgaggauaggaguauaagggugugggacaugucaaagaggacuugcuugcauacguuuagaagggaacacgagcgauuuugggucaugacgagccacccgaauuugaauuuauucgccgcuggucacgacggcggcaugguaauauuuaaauuggaacgagaacgaccggcuuacacggugcacggcaaccugcuguauuacgucaaagagaaguauuugagaaaacucgauuuuacaacguccaaggauguucccguuauucaaaucagagguggugguaaaaucccagucuacagaauguccuuuaauccugccgaaaacgcuguuuuacuauccacucgcacuucuaaucuggauaacagcacuuacgauuuguacaugauucccaaggaucaggaacgggacgaucacgugccugaagccgaaagcaagagaucuucgggucuuaccgccuuguggguagccagaaaucgauuugcugugcucgacaggacucaccaauugaucauuaaaaaucugaaaaacgaaguaacgaaaaaaguccaaacgcccacuugcgaugaagucuuuuacgccggaaccggcauguuguuguugagagauuccgaacacguuacguuguucgauguccaacagaagaggacuuuggcucaagugaaaauuagcaagugcagauacgucguguggucuucggauaugucgcaucuagcucuucuaucuaaacauaaugugacgauuugcaacagaaaauuggauguucuguguucguugcacgagaauacuagaguuaagucgggugcuugggacgauagcggagucuuuauuuacacuacaaguaaccauauuaaguacacauugaaaaauggugaucacggcauuauaagaacccucgaucuucccauuuacauaacgagaguaaaagguagucagguguucuguuuggacagggaaugcaagccucgccuguugguaaucgaucccacugaauacaaauucaaacucgcguugaucaaucacaaguacgaagaagucuuguacauggucagaaauucucgauugguaggccaaaguauuauaucuuacuugcaacagaaaggauauccagaaguagcuuugcauuuuguuaaggaugacaaaacuagguuugcucuggcuuuggaaugcgggaacaucgaaauugcuuuggaagcagcgaaagcucuaaaugauaaaaauuguugggaucaauuggcacaagccgcuuuguggcaaggcaaucaucagaucguagaaaugugcuaucaacgaacgaaaaguuucgaaaaacuauccuuccucuaccuaaucaccggcaacuuggaaaaacugagaaaaaugaugaaaaucgcugaaauuagaaaagccagaucgucccaauaccacgcugcuuugcucuuaggcgaucucgaagagcgcguaaaacugcucaaagcuuccaaucaacuaucucuagcguauuuaaccgcugccacgcacggcaugcgagaggaagccgaacaacucaaagaacaaaucggcgacgauaaaaaacugcccgacgucgaucccaaagcaaaguucuugaaacccccuccgcccauucaacaagccgaguccaauuggccuuugcucacagucagcaggaguuucuucgagaauaccgcagcugccgcgaccgcuucggccaacaugaaaucucugauggccgagcccguuacggacgugggaauggaagacgcccagggcuggggcgacgacgacgaacuagaacuggauccugacgagaagaaggccgaagucgccgccgcaggaggcggugauggcgaaggcggcugggacguggaggacgaagguuuggaaauccccgaucucggaccgaccgcaaccguagaagcagaaggcaauuucgugcauuuacccacucaagggccgucuccgcuuauuguuuggacgaagaauucgcaguugguggccgaucauguggcugcggguucauucgaaucggccgccagguugcuucacgaucaauuaggaguggugaauuucaggccuuucgagaguuuguuuuugaauuuguacaguacuucgaagacggugucuucuuggcagcaaaacguaccgccuucguucaguuacccguugaggaauuggaaggaaggaaacguuaagaaucagcugcccgcuucgggagugaaauugaacgauuuaguagcaaaauugcagauuugcuaucaauugacgaccggugggaaauucacggaagccaucgagaaauugcaaacucugcuguugucaguuacgcuucucgugguugauaacaaacaggaaauuuccgaggcucagcaguuacucagaauagccagcgaguauauuugcgguuugcaaauggaaacuuugaggaaaacucuaccgaaaacuucggccgaagagcagaaacgccagugugaaauggccgcguauuucacccauuguaaauuacagccgauacaucaaauccucacgcucagaacggcgcucaacauguuuuucaagcucaaaaacuacaaaacggccgcuucuuucgccaagaggcuguuggaauugggcccgagaccggagguggcccagcaagcgaggaaaauauugcaagcgugcgauucgaaucucaccgaugauuuccaauugcacuaugacgagcacaauccguucaacuugugcgggcacuccuacacgcccaucuacaggggcaaggccgaagagaaauguccauugugcgguacuuccuauuugccuaaauauaaagggguguuguguaauauuugcaaaguggcggaaguuggaaaggauaccauuggauugaggauuagcacgcaucaguuuagguaa

SEQ ID NO: 635 - RNA, 552 nt, Phyllotreta armoraciae
augggccgauacgcucgcgaacccgacaaugcggcgaagucuugcaaagccagaggcuccaaccuuagaguccacuucaagaauacaugcgagaccgcgaacgccauaaggaagaugccccucaaaagggcaguagccuauuugaagaaugucgucauucaaaaagaguguauuccauuuaggagguuuaacggaggaguuggucguugugcucaagccaagcaauuuggcacgacacaggguagauggcccaagaaguccgcggaauuucuguuacagcuccucaggaacgccgagagcaacgcagauuacagugggcuugaugucgauaggcuaguuguagaacacauucaaguuaacagagcugcuuguuugagacgucguacguacagggcucacgguagaaucaauccguacaugucgucucccugucacaucgaacucugguuaaccgagggagaaucgucaccugaagcucccaagaagagcaacaaaaagaaggcaacggagaagaagagacccaagucaucaguugcugcaguagcgcauuga

SEQ ID NO: 636 - RNA, 315 nt, Phyllotreta armoraciae
auggugaacguuccgaaacaaaggcguacauuuugcaaaaaaugcaaaguccacaagcugcacaaagugacgcaguacaaaaaauccaaagaacgucacgcuucgcaggguagaagacguuacgacagaaaacagcaggguuucgguggucagacuaaaccuauuuucaggaagaaggcaaaaaccaccaagaaaaucguguugaggauggagugugcugauugcaaguacaggaugcaguuccccuugaagagaugcaagcacuucgaacuuggaggugacaagaagcgcaagggccagaugauccaguucuag

SEQ ID NO: 637 - RNA, 2340 nt, Phyllotreta cruciferae
augacuacuuacgaggaauauauucaacaaaaugaggaccgagaugguauccguuuuacguggaacguguggcccuccagcaggauugaagccacccgcuuggugguaccauuagccugccucuaccagccuaucaaagaacgaguagaucuuccuccaauacaauacgauccaguauugugcacaaggaacaacugcagggcuauuuuaaauccacugugucaagucgacuaucggaguaaauuauggguuugcaacuuuugcuuccagagaaauccauuuccucaacaauacgcagcuaucuccgaacaacaucagccugcugaauuaaugccuauguucucgacuauugaguacacaauaaacagaguucaauguuuaccucccauauucuuauauguugucgauacuugcauggaugaagaagaauuggguucucuuaaggacucauugcaaaugucguugaguuuguugccgcagaacgcuuugauuggccugauuacauuuggaaaaaugguucaaguucacgaauuaggcaccgaaggugugagcaaaucguacguauuccgaggaacuaaggaucuaacggcuaaacagguucaggaaauguuggguauugguaaagucucgauggcuccucacaauccucaacaacaaccgcaacaaccuggacaaccuaugagaccgggacaaccucaaucugcgccuguuccaccugguagcagauuccugcaaccuauuucaaaaugugauaugaaucuaacggauuuaauaggagaacaacagaaagauccuuggccuguacaucaagguaaaaggccacucagaugcacugguguugcauuaucgauugcuaucgguuuauuggaguguaccuaugcaaauacgggagcuaggguuaugcuuuuuguuggggguucuugcucacaagguccuggucaaguuuugaaugacgauuugaaacagccuauuaggucccaucaugauauccaaaaagauaaugcaaaauauaugaagaaagcuauuaagcauuaugauacuuuagcgaugagagcagcgacuaauggucauugcauugauauuuauuccugugcacuugaucaaacugguuuaauggaaaugaaacaaugugcuaauucaacagguggucacauggugaugggagauucuuuuaauucaucgcucuuuaaacaaacauuccaaaggguguucacacgagaucagaaaaacgauuugaaaauggcuuuuaacggaacauuagaagugaaauguucucgagaauuaaaagugcaaggaggaauuggauccuguguaucauuaaacgucaaaagucaacuggucucugacacagaaaucggcaugggcaacacuguacaauggaaaauguguacgcuuacuccaagcacuacgauggccuuguucuucgaagucgucaaucagcauucugcgccaauuccgcaaggaggaagagguugcauacaauuuauuacucaauaucaacacucaaguggucaaagaaggauuagagugacaacaguggcucgaaacugggcugaugccacuacuaauauccaccacaucagcgcugguuuugaucaggaagcagcagcuguaauuauggccagaauggcuguuuauagagcugaaucagaugagagucccgacguucugagaugggucgauagaaugcugauucgauugugucaaaaauucggagaauacaacaaagacgaugcugguucauucagauuaggccaaaacuuuagccucuauccgcaauucauguaccaucuaaggaggucucaguuccugcaaguuuucaauaauucuccugaugaaacgucguucuauagacauauguugaugagagaagaucuuacucaaucauugaucaugauucaaccaauuuuguacaguuacaguuucaacggcccuccggagccuguucuauuagauacgaguuccauacagcccgauagaauacugcuuauggacacguuuuuccaaauuuugauauuccacggagagacuauagcucaguggagaaauuugaaauaccaagacaugcccgaauacgagaacuuuagacaauuacugcaagcaccuauugaugaugcucaagagauauuacaaacaagguuccccaugccgagauauaucgauacagaacaaggaggaucgcaggcuagauuuuuauuguccaaagucaauccgagucagacucacaauaacauguauucauauggaggggacgcuggcgcuccaguuuuaacagacgauguaucacuucaaguauuuauggaucauuugaaaaaauuggcaguuucguccacggcuuaa

SEQ ID NO: 638 - RNA, 2718 nt, Phyllotreta cruciferae
augccacuucgguuagacaucaaaaggaagcuaacagcccguucugaccgggugaaaugcgucgaccuccaucccacggagcccuggaugcucuguucacuuuacagcggaaacauaaacguauggaaucaugaaaaucagcagcucguuaaaacguucgagguaugcgaucugccagugagagcugcgaaauucguuccgaggaaaaauuggauuguuaguggaucugaugacaugcagauuagaguuuuuaauuacaauacauuggaucgugugcaugcuuuugaagcccauucugauuauguccgauccaucguuguucauccuacacagccuuauaucuuaacaaguagcgaugauaugcuaauuaagcuguggaacugggagaaagcaugggcaugccagcaaguguucgaaggccacguucacuacaucaugcaaauuuccaucaaucccaaagacaacaacacauucgccagcgccucauuggaccgaacgauaaaagucuggcaauugggcgcuucuacggcgaauuucacgcucgagggccacgagaagggcgucaauugcgucgauuacuaucacgguggcgacaaacccuaccugauauccggcgcugacgacagauuggucaaaaucugggauuaucagaacaaaacgugcguucaaacguuggaaggacacggacaaaacgugaccgccguuuguuuccauccggaauugccgaucgcccucaccggcagcgaagacggcacggugagaguuuggcacgcgaacacgcaccgauuagagagcaguuugaacuauggcuucgaacggguguggaccauauucugcuugaagggcuccaauaacguggcccucggcuaugacgaggguagcauucucguuaaagucgguagagaagagccggccgugagcauggacgcgagcggagggaaaaucauaugggcgaggcauucggaguuacagcaggccaaucugaaagccuuacccgaaggagcugaaauaagagacggcgaacguuuaccagucuccaucaaagacaugggcgcuugugacauuuacccucaaacuauucagcauaaucccaacgggcguuucguggucguuugcggcgauggagaauacaucauuuacacggccauggcgcugaggaacaaagcguucgguagcgcgcaggaguucguuugggcgcaggauucgagcgaauacgccaucagagaguccggaucuaccaucagaauauucaagaacuucaaagagaagaagaauuucaaaucggacuuuggagccgaaggcaucuauggugguuaucuguuggguguaaaaucuguauccggauuggccuucuacgauugggaaacucuggauuuaguuagaaggaucgaaauacaaccucgcucgauauacuggucugauagcggcaaacuaguuuguuuagccaccgaagauaguuauuucauacucucuuaugaugcugaagaaguucaaagagcaaaggauaauaaccagguggccgaugauggaguggaguccgccuucaaucuacugggugaagugaacgagucuguucguacaggucucuggguaggagauugcuucauuuacacaaacgccguaaaccguaucaauuacuucgucggaggugaauuggugaccaucgcacaucuggauggcccauuguacguacugggcuauguuccaaaggaugauaggcucuauuuagucgacaaagaauuaagaguggucagcuaucagcugcuccuuucggucuuagaguaccaaacugccguuaugagaagagacuucucgacagcugacagaguguugccuucgauuccuaaggaacaccgaacgagaguggcucauuucuuggaaaagcaaggcuucaaacaacaagcucuggccgugagcacugauccugaacacagguucgaacuggcuguagcuuuggaggauuugaauaccgccaagaugcuggcucaggaagcuaacaauccgcagaaauggagccagcuggccgauuuagcggcguccacgaauaaucucguguuggccaaagagugcaugcagaaagcccaagauuacgguggauuauugcucuuggcuaccaguucuggagaugacgagguagugaggacauuaggcgaagccacagaagccgagggcaagcauaacuuggcauucuuaucccacuuauuaaucggggacuugaacaaaugucuggacauuuugauaagcaccgguaggcuuccagaagcugcguuuuucgcaaggucguaucuucccgauaaaauauccgaaguaguggaacuuuggagggcgcaauugucgguuaccaaucagaaagccggucaaaguuuggcggauccuaaagacuacgacaaccuguuucccggucuucaggaagccauuguggcgcagaaauauuuggaagagaaccacucgggauucauaccggcugcuauggccgccaccguuacuccaaaucaagaaaggaacguaauagcagagguggaagccaagguaaaaggugccgaugguguguugccgagcacgucgcaaccuucgguuaaggcgccaagcgaacagaugaagaaacucucgauuacucaagaugaggacgauuuggauuuggaccuugauggagugaacauugaugaaaauauagauacaacggauaucaauauagaugaugacuuguuaagugauuga

SEQ ID NO: 639 - RNA, 2824 nt, Phyllotreta cruciferae
augaccgcggucgaacagcccuguuacacuuuaauuaauuuaccgaccgauucggagccuuacaaugaaaugcaauugaaaauggaucucgagaagggcgaagugaaaguaaagauaagggcuuuggaaagaaucauucacaugauacuggcaggcgagagguugcccaauggauuccugaugacaaucauacgaaacguucugccccuucaagaucaccuggccaagaagcuuuugcuaauuuuuugggaaaucgugccgaaaaccacccccgaugguaaauuacugcaggaaaugauccuaguuugcgacgccuacagaaaggaccugcaacaccccaacgaauuccugcgaggauccacauugagguucuuaugcaagcugaaggagcccgagcuauuggagcccuugaugcccagcauucgaauuugccuggagcacaggcacagcuauguccgaaggaacgccguucuggccauuuuuacgauauacaagaauuucgaauuucucauuccggacgccccugaauugauuuccacuuaccuagauggcgaacaagacaugucuugcaaaagaaacgcuuuccucaugcuguugcaugccgaucaagaucgagcacucacuuaccuauccaauugcuuagaucaaguggcaucuuucggggauauucugcaguuggugaucgucgaauugauauacaaagugugccacucuaacccaaccgagagauccagguucauucgaugcauauacaaucuguuaaauucgagcaguccugcugugagauacgaggcggccgguacucugauuacuuuguccagcgccccgacggccauuaaagccgccgccaguuguuacauugaauugaucauuaaagaaagcgacaacaaugucaaauugaucguuuuggauagauugaucgccuugaaggagcaucccagccacgagagaguccugcaggacuugguuauggauauauugagagugcugucggcuccugauuuggaagugcgaaagaaaacgcuuaauuuagcgcucgaauuggucucuucacguaacgucgaagaaaugguguuugugcugaagaaagaggugucgaagacuguggauagcgaacacgaggauacugggaaauacaggcaauuguuaguuagaacguugcauucuuguugcaucaaauucccugauauagcugcuacagucauuccuguucugauggaauuucuguccgauagcaaugaauuggcggccaccgauguguugcuauuuuugagggaggccauacagaaauucgauaauuuggagccgcucauuaucgagaaauuauuagagacauucaaagacaucaaaucugugaaaguucaucgugcugcucuuuggauauuaggugaauacgccacgucuacugcagacauagaagcuguaaucaaagagaucguucaaacauugggcgaaugcccucuguuggagucugagcaaaagauuauaucggguaguacagaugaaagugcgccagcucaugcaccagccggggccaccacuuugguuacuucagauggaacuuacgccacucaaucugcuuucaacguggccaguaaaucuacaaaagagaagagaccuccuuugaggcaauaccucauggauggagauuuuuucauagccgcuucuuuggccucuacuuugaccaaauuggcuuuaagauauggugaaaacguuuccgcuuccgauaggaauaaauucgacgcugaaguuaugcuuauuauggcuggcauuuugcauuuaggcaaaucagguuugccgguaaaacagauaacuaacgacgacaacgaccacauucucuucugccugcgcgugcuauccgaucgcacggagcccgucguccaaguauucucgagccugugccgcaacgcccucaacgacaugcugcuggccaaggaaaccgaagaggcgaccgaucagaaaucgcgagagaaaucccgagccgccguccaaaccgacgacgccaucaccuucgugcaacuggaguccgaccgaagcggcgagcucggcgaaaacgucuucgaaaccucccugucgcaggcccuaaugggcggcaagacggggcaaucggacuccaccaucggcucgaguaaauugaacaagaucgcccaguugacggguuucucggauccuguuuacuccgaagcguaugugcacguuaaucaguacgauaucgugcuggacguguugguggugaaccaaacgagcgacacgcugcagaauuguacucuggaguuggcgacucugggcgauuugaaguugguggagaagccucagccggucguucuggcgccgaaggauuucugcaauaucaaggcuaacgugaaaguggccucgaccgagaaugguaucauauucgguaacaucguguacgacgugacaggcgccgcuucggacaggaauguagucguuuugaacgacauacacaucgauauuauggauuacauuguuccggcaucgugcaccgauucagaguuuaugaggaugugggcugaauucgaaugggagaauaaggugaccgucaauacgccgcugacggaucucaacgaguaccuggagcaucugcugaagaguacuaacaugaagugccugacaucagagaaggcgcucggcgggcagugcggcuucauggcggccaauauguacgcgaaaucgaucuucggggaggacgcacuggcgaauuugagcaucgagaagccguucaacaagccggacgcgcccgucgccggucacauuagaauucgggccaaaagucaggguauggcuuugaguuugggcgacaaaa

SEQ ID NO: 640 - RNA, 1521 nt, Phyllotreta cruciferae
  misc_feature (627)..(723): n is a, c, g, or u
augcagaucuucgugaagaccuugacugggaaaacaauuacauuagaagucgaaccuucugacaccaucgagaaugucaaagcuaaaauucaggacaaagaagguaucccaccagaccaacagagauugaucuucgcugguaaacaauuggaagauggccguacucuuucugauuacaacauccagaaagaaucuacucuucacuugguuuugagacuucguggugguaugcaaaucuucguaaaaacucucaccggcaagaccaucacccuugaagucgagccaucugacacuauugagaauguuaaagccaagauccaggacaaagaagguaucccaccagaccaacaaagauugaucuucgcuggaaagcaauuggaagauggccguacucuuucugauuacaacauccagaaggaaucgacccuucacuugguuuugagacuucgugguggcaugcagaucuucguaaaaacucuuacuggaaaaaccaucacccuugaagucgagccauccgacacuauugagaauguuaaagccaagauccaggacaaagaagguaucccaccagaccaacaaagauugaucuucgccggaaagcaauuggaagauggccguacucuuucnnnnnnnnnnnnnnnnnnnnnnnnnnnnnnnnnnnnnnnnnnnnnnnnnnnnnnnnnnnnnnnnnnnnnnnnnnnnnnnnnnnnnnnnnnnnnnnnncagagauugaucuucgcaggaaaacaauuagaagauggccguacucuuuccgacuacaauauccagaaggaaucuacccuucacuugguacuuagacuucguggugguaugcagaucuucguaaaaacucucacuggcaagaccaucacccuugaagucgagccaucugacaccauugagaauguuaaggcuaaaauucaggacaaagaagguaucccaccagaccaacagagauugaucuucgcaggaaaacaauuagaagauggccguacucuuuccgacuacaauauccagaaggaaucuacucuucacuugguacuuagacuucguggugguaugcagaucuucguaaaaacucuuacuggaaagaccaucacccuugaagucgagccaucugacaccauugagaauguuaaggcuaaaauccaggacaaagaagguaucccaccagaccaacagagauugaucuucgccggaaaacaacuugaagauggccguacucuuuccgacuacaauauccagaaggaaucuacccuccacuugguacuuagacuucguggugguaugcagaucuucguaaaaacucuuacuggcaagaccaucacccuugaagucgaaccauccgacaccaucgagaauguuaaagccaagauccaggacaaagagggaauucccccagaccagcaaagauugaucuucgcaggaaaacaauuagaagauggccguacucuuuccgauuacaacauccagaaagaaucuacauugcauuugguacuccgucuuagaggaggacaguaa

SEQ ID NO: 641 - RNA, 603 nt, Phyllotreta cruciferae
auggaaugccuacucgguaucaaauucgacgauuucguuuuaguugcugccgauaugacugcggcccaaagcauaauuguuaugaaaacagacgaaaauaagcuguuuaaauugucuaacaagcuuguuauggcuguauccggagaauccggcgauacuacccaauuugccgaguacauugcuaagaauauccaguuguauaaaaugagaaauaccuacgaacuuagcccaucggaagcagcauccuuuacucguaggaaucucgcugaugcucuuagaagcagaaguccuuaucacguaaauuuguugcuggcuggauacgacgagaaagaaggcccccaguuauacuacauggacuacuuggcgucgaccaucaaaguuaauuacgcugcucacggcuacggaggguucuucucguugucuauaauggacagaaacuacgucaaaucgcucaguagagaagaaggcuacgaguuguugaaaaaaugcgugaaagaaguucaaaaaagauuaaucaucaauuuaccuaacuuuaagguacaguguguaggcagggaugguauaacagaccugcccgacaucaccgccaaggauuuggcuuaa

SEQ ID NO: 642 - RNA, 484 nt, Phyllotreta cruciferae
auggaagaggccuccaaggcaaagaaggccaagaaagguuucaugacccccgaaagaaagaagaaacuuagguuacuguugagaaagaaagccgccgaggaauuaaagaaggaacaggaaaggaaagcggccgagaggagacgcaucaucgaagaacgcuguggaaagcccaaacugaucgaugacgccaaugaagaacaacuuaagaguauuuccaaagcguaucacgagagaauuugcaagcuggaagaccagaaauucgauuuggaauaucuagucaaaaagaaagacauggagaucgcggaauugaacagccaaguaaacgaccucagaggaaaauucgugaaaccgacguugaagaaggugucgaaauacgagaacaaauucgccaaguugcagaagaaggccgccgaauuuaacuuccgcaaccagcucaaaguggucaagaagaaggaguucaccuuagaagaagaagacaaagaga

SEQ ID NO: 643 - RNA, 795 nt, Phyllotreta cruciferae
auggucgagaagaagaagaccgaaacugcgccugcagaggcacccaaaaaggugcacaaaccuggaaaaccuagaaauuaugauuuaggaaauggcguuaugagguuuucaagaaccaagauguuccacaagaaggcuuuauauaaauuuauuggcaaaaaaguuaaggcuaccaagaagccgcaaaagccucacguuaucgaaaagccaauuaauggagaaaagaacggaggaaagagauucgucuuagucaagaaacguagggcguacuauccuacucaagacaagauaaagccgaggccugcaaagaaauccuucugucagcacaaacgcucgcucagaacuaccaucacuccugguaccguucuuauuuuguuggcugguucccacaagggaaagagggucguuuuccugaaacaacuuuacucuggccuuuuacuugucaccgguccguuuucuauuaaugccuguccguugagacguauuagucaacgauacguuauugcgacaucgaccaaaauugauguuagcgguauuaaaguucccgacaacuuugacgaugacuauuucgcgaggaaacgcgucaagagggcaaagaaagaagaaggugauauuuuccaaaccaagaaagagguuuacaaaguaagugaggaaaggaaaaaggaccagaaggaagucgauucacaggugauggcagcgaucaaaaaacauccugaucguaaaguucugcaauccuauuuaucaucuaugugggguuugaggucuucucaauauccucacagaaugaacuuuuag

SEQ ID NO: 644 - RNA, 678 nt, Phyllotreta cruciferae
augccgccuguaaugacugauuuuaugccacaagaugguucgaacgauuggagggacgcugcccacaguaccggaacuuccauuauggcaucagaauucgacgguggagucgucauaggagccgauucacguacaaccaccggggccuacaucgcaaacagagucucugacaaacuaacgagagucacugaucacaucuacugcugccggucgggcuccgcugccgauacggaggccaucgcagauaucguaggauaccauuugaacuuccacgggauggaauuaggggaagagcccagcguagaaguaggagcugcuauauucaaggagcugugcuacaauuacagggacuccuugauggccgguauacucguagcagguugggauaagaagaaagggggccagauuuauuccauacccauugguggaaugugcgugagacaggagguguccaucgggggguccggaucgagcuacguguacggcuacauggacgccaauuacaaaccgaaaaugucuaaagaagauugcguuaaauucguuacuaauacuuuggcucucgcaaugucuagagaugguucuucuggcgguguaaucagauuagguaucaucacggaggaagguauagaacguaggguuguauuagguaacgaauugcccaaauuuuacgaaggcuaa

SEQ ID NO: 645 - RNA, 747 nt, Phyllotreta cruciferae
auggcagggaaaggagacggcaaaggcgaggcgaguauacucaaauuggaaaaucagauugccgucaucaaauacgugauacucuuugccaacgucuugcaaugggcccucggcggcgcaaucuuugcccuuugccuuuggcugagguucgaggagggcauccaagaauggcugcagaaauuggauuccgaacaauuuuacaacggaguuuauguacuuauagucgcuucgcugaucgucaugauuguguccuuucugggauguauuagugcccugcaggagaauacggugacccuuuuggccuacaucggcacgcaagugcugagcuucauauucgguuuagccgggucggcuguucuucuggauaacagcgccagagauucccacuuccagccgaggauucgggagagcaugcgacgucuuaucaugaaugcucaucacgagccauccagaguaacgcucgccaugauucaggaaaauaucggcugcugcggugcugacggagcagaagauuacuuggcgcugcaacagccauuaccgagccaaugcagggacaccgucaccgguaaucccuauuuccacggaugcgucgacgagcucacgugguucuucgaggagaagugcgccuggauagccgcauuggccaugugcauuugcuucuucaacguuuuuaacaucgugcuuuccacugugcugauacaggcguugaagaaggaagaggaacaggcggauucuuacaggaauuag

SEQ ID NO: 646 - RNA, 3021 nt, Phyllotreta cruciferae
augaauauuacuucggcugcggggauuauaucccuuuuagaagaaccaagaccagaacuuaaaguauucgcguuaagaaaacuagauucaauagucgaugaauucuggccagaaauuucagaagcuauugaaaagauagaaauucugcacgaagacaaaguguuccaacaacaccaguuagcugcuuuaguugcuaguaaaguguacuaucaucugggugcauuugaagacucauuaacguacgcuuugggagcuggugaucucuucgacguaaaugcuagaacagaauauguugaaacaacacuugcaaaaugcaucgacuucuauacacaacaacgcaucgccuuagcagaaggugcaaccgaugcgaaaccuauugauucgagacucgaagcgauuguaaaccgaauguuccaacguuguuuggaugacgggcaaaaccgccaggcuauggggcucgcuuuagagaccaggagaauggauaucuucgaauuaucuaucacacaagcugaggauauuauuaguaugcucaccuacgcuuuccaaguggcgaugagccuaauucagaauagggcauuucguaacacuguuuuaagaucguugguuggcuuguaucgcgguuugacuacaccagauuacguuaacaugugucaaugucuaauuuucuuggacgaugcacuaccagucgcagaaauauuggauaaguuagugucugguaaagaagagucugaguugauggcuuaccaaauagcuuuugaucuuuaugagucagcaacgcaacaguuuuuggaaagaguuuugguugcccuaagagcuacugcucccauuccuucgcuguuagaggaaaaggugaaaucuaaaacuacugaacaaucuaguagcacuuccgcagaggcuagcaaagauccuguuagcagugaaacuaaaagcgagguuaaaaaagaagaaaaaucuauugagaguuugacugaaagugaaaaggaacaccaaaagcgaauugaaaaauugcauaccaucuuaucaggcgaaguaucaauagaacuucaucuucaauuucucauuagaucuaaccacgccgaucuucuuauucugaagcaaacgaaagaaacuguucgagucagcauuugccacacugcuacagucaucgcuaaugcuuucaugcacagcgguacuaccagugaccaauuucuaagggauaauuuggaauggcuagcucgagcuacgaauugggcgaaacuuacagcaacagcgucucucggugucauccaucguggacaugaacaagaggcuuugacucucaugcaaagcuauuuaccgaaggaaguugggccgaguuccggauauuccgaaggcggugguuuauacgcucuuggucuuauccacgccaaucacggugcuaauauaaucgauuaucuucuuggucaauugaaagaugcucagaacgagaugguuagacacggcgguuguuugggccuugguuuggcugcuauggggacacacaggcaagauguauacgaacagcucaaguucaaucucuaucaagaugaugcuaauacuggagaggccgcuggaauugcgauggguaugguuauguuaggauccaguaauuccaccacuauuauggauaugguagcguaugcgcaagagagucaacacgaaaaaauucuucgcgguuuggcuguugguauaagcuucacgauguacggccgauuagaagaagcugauacccuaauacagcagcuuacuucugauaaggauccaauccugagaagauccggcauguauacauuagcuauggcuuauugcggcacgggacacaaccaggcgauuagaaaauuauuacacguugcgguuucugauguaaacgaugacgugagaagagcggcagucacagcgcucgguuuccuguuguucagaacccccgagcaaugucccagcguggugucccuuuuagcggaaagcuacaacccccacgugcguuacggggccgccauggcgcugggcauagccugcgccggcacgggccuccgcgaggccauagcccugcucgagcccauggucauguucgauccggugaacuucguccggcagggggcucucaucgccucagcgaugauccucauccagcagaccgagcagaccugcccgaaggucagcuucuucaggcagaccuacucccaggucaucuccaacaagcacgaagacgucauggcgaaguucggcgccauuuuggcgcaagguauaaucgaugccgguggcaggaacgugacuuuaucgcugcaauccagaaccggccacacuaacaugcuggccguugucgguacauugguguucacgcaguauugguauugguucccucugucgcauugucuggcuuuagcuuuuaccccgacgugcguuauagcguugaauacucaacugaagaugccuaaauuggaguucaaaucgaacgcgaaaccgagcuuguacgccuacccggcgcccauggaggaaaagaaacgcgaagaaagggagaaagucaccaccgccguauugagcauagcugcgaggcaaaggagaagggaucacgagaggaaacaucgcgaugagaaaauggauguggacgaagauaaagacgauaagaaaaccgaaaaggaggagaaagagaagaaaaccgaagacaagaaagaggagaaaaaguccgaugauaagaaaaccgacgauaaaaaagcggcgucgucgagcgacgacaaaaaagauaagaaagaugauaaggaggagaagaaaaaggagcccgagccuauuuucgaaaucuugcaaaauccugccaggaccaugaggcaacaacugaaagugauuacgcuuaaugauaacucgcaauacguugcaaugaaggauguuucuaucggagggauuaucaugguucgcaauuugaaaccuggcgaagaagaauugguggaaccuguagcagcauucgguccaaagggcgaugaugaaaaggaaccagaaccaccagaaccauucgaauggaccgaggauuag

SEQ ID NO: 647 - RNA, 384 nt, Phyllotreta cruciferae
augcaaauuuucguaaaaacucucaccgguaaaaccauuacccucgagguagaaccaucagacaccaucgaaaaugucaaagcuaagauucaagauaaggaagguauuccucccgaccagcagcgauugauuuucgcagguaaacaacuggaggauggccguacccuuucagauuacaacauccaaaaggagucuacccuccacuuggugcuccguuuuagaggaggaaucaucgagcccucucugcgucuucuggcccaaaaguacaauugcgacaagaugaguugccgcaaguguuacgcuagacuacauccuagagcuaccaauugcaggaaaaccaaguguggacacaccaacaacuugcgccccaagaagaagcugaag

SEQ ID NO: 648 - RNA, 2640 nt, Phyllotreta cruciferae
augagcucuuuuaaaagagacaaaaaggaggaagaagacggaguuggaaacauauuucaaaauaucgaaaaaaccacuguuuuacaagaagcucgaguguuuaacgaaacaucagugaauccaagaaaaugcacccuaauucucaccaaauugcuuuaccuacuaaaucagggggaagcuuuaaacguaaaagaagcaacagacguuuucuucgcaaugaccaaacuauuccaaucgaaggacguaauacuucgaagaaugguguaccuaggcaucaaagagcugagcucgaccgcagacgauguaaucauaguaacuucgagccucaccaaagauaugaccggcaaagaagacauuuacagagcagcugcuauacgugcuuuaugcagcaucaccgaugcuaccaugcuacaagccaucgaacgguacaugaagcaagcaaucguagauagaaauuccgcugucaguucagccgcauuggucagcucuuugcacaugaccaaaauggcaccugaaguggugaaaagauggguaaacgaagcacaggaagcuauuaauagugauaauguaauggugcaauaucacgccuuggggcuccuauaccacaucagaaaaacagauagguuggcuguuacaaaauuaauagcuaaacuaaccagaacuacccugaaaucuccuuaugcuguuuguaugcuuaucagaauaauagccaagcuccucgaagaagaagauuccaacaaugauuuucccuacuucgauuucaucgaaucuugucuaaggcacaagucugagaugguaguuuacgaagcagcccaugcuaucguuaaucucaaacguacgacuagcaaagaauuggccccagcugucaguguauuacaauuguucugcgguucaccgaaggcuacuuugagauucgccgcuguaagaacucuaaaucaaguggcuauuucccacccggccgcugugacagcuuguaauuuagauuuggagaacuugauuacugauucuaaucgaucgaucgccacucuugcuaucacuacuuuauuaaaaacuggugcugaaucgucuguugaucgucuuaugaaacaaauagcgaguuucguaucugaaauuagcgaugaauucaaaguugugguaguucaagcgaucagagcucuggcucuuaaauucccucgaaagcauaacacucucaugaacuuuuuaucggcuauguuaagagaugaaggcgguuuggaguacaaagcuuccauugcagacaccauaauuacuauaaucgaagauaauccugaagcaaaagaaucggguuuggcucaucuaugcgaguuuauugaagauugcgaacacguuuccuuagcuguuagaauauugcaucugcuagguagggaaggaccaaaaaccaaacaaccuucuagguacauccgcuucaucuacaaccgcgucaucuuagagugcccuuccauaagagcugccgcuguuucagccauggcacaauucggagcuucgugucccgauuuguuagaaaacauucaaguauuacuagcaagaugccaaauggacucggacgaugaaguuagagacagagccacuuauuacagcagcauacucaauaagaacgauaagaacuuguacaacaauuauauccuggauacuuuacagguaucuauaccaucgcuggaacgcucguugaaagaguacacgcaaagcccuacgaaucaaccguucgacauaaaaucaguuccauugcaagugggcccgucuccggacgagcgcgagaagaagcacaaguccgaaggcauguugacgucgcaagggcccuugcggccgccgcccgucucccgcgaggagaacuucgcggagaaacugucggccauaccgggcauccagcagcugggcccgaucuucaagagcuccgaggugguggagcugaccgaauccgagacggaguacuucgugcgcugcaucaagcacugcuucgcccaccacgugguccugcaguucgauugccugaacacgcuggccgaucaauugcuggaggacgugcggguggagcuggagccgagcgaaggguucgaguugcugucgguggugccgugcaagcagcugcauuacaacgagaccaaucacaccuacgcuauuuugaaguuccccgacgacgaucugccuaguugcguugguacuuucggggcgguguugaaguuuaucguuaaagauugcgaucccaccacuggcauucccgauagcgaugaagguuacaaugaugaauacauacucgaagacuuggaaauaacguugggcgaucaaauacagagagugagcaaggucaauuggggcgccgcuugggaaucggcugcugaggguuccguggaaaaggaggauacguauucucucaguucgaugaauacguuggaugaagcugugaaaaauaucgugcaguuccuuggauugcaaccggccgaaagaacugauaaagugcccgaaggcaagagcacccacacgcuucuacuaucaggagucuuuagaggaggaaucgauauuuugguaagagcuaaacuugcuuuagcggaugguguuacaaugcaacugacuguaagaucacccgaugacagcauagcugaacuuauuaccucuucuguagguuaa

SEQ ID NO: 649 - RNA, 1284 nt, Phyllotreta cruciferae
augucgaccuuagaagacaaaucgauuugggaagacggcgaggaagcgcucggcgaggagguuuuaagaauguccacugacguuaucaucggucauacgcgauugcuggacaacgagauuaaaauaaugaagagcgaagugaugcgaauaaaccacgaacugcaggcgcaaaacgagaagaucaaagagaauaccgagaaaauaaaagugaacaaaaccuugccuuacuugguuucgaacguaauagaacuguuggacguggauccccaagaagaggaagaggacggcgcaguagucgauuuggauucucaaagaaaagggaaaugcgcuguaguuaaaacguccacaagacagaccuauuuucuaccaguuauaggacuagucgaugaggagaaauugaaaccgggugaucuagugggagucaacaaagacucuuaucuaauuuuggaaacauuacccgcagaguacgaugccagagucaaggcuauggaagucgacgaaaggccuucugagcaguacuccgauaucggagguuuagauaaacaaauacaagaacuuaucgaagcuguuguacuaccuaugacgcauaaagacaaguucguuaauuugggaauucauccuccuaaagguguucuccuuuacggccccccggguaccggaaaaacccuccuagccagagccugcgccgcccaaacgaaaucaacuuuccucaaacuggccgguccucaguuaguccagauguucauaggagacggcgccaaauuagugcgagacgccuucgccuuggccaaagagaaagccccagcuauaauauucaucgacgagcuggacgccaucgguacgaagcgauucgauucagagaaagccggcgacagggaaguccagcgcaccauguuggagcugcugaaccaauuggacggcuucagcucgacauccgacaucaaagugauagcggcuacgaaucgcguggacauccuggaccccgcucugcuucgguccggaagguuggacaggaagaucgaguucccgcaucccaacgaggaggcgagggccaggaucaugcagauucacuccaggaaaaugaccgucaacccggacgugaacuucgaggaauuggccaggucuacggacgacuucaacggggcucaguguaaggcugugugcgucgaagcggguaugaucgcucucaggcguaacgccacggcugucacgcacgaggacuacauggacgcgauuauggaaguucaagcuaagaaaaaggcgaaucuuaauuauuacgccuaa

SEQ ID NO: 650 - RNA, 660 nt, Phyllotreta cruciferae
augaguuucuuuaguaaaauauucggaggaaaagaaaaggaugugggccccacgccaggcgaagccauccaaaagcucagggaaaccgaggacauguuauauaaaaaacaagaguuuuuagaaaagaaaauagaggaauauacacuaguagccaaaaaaaaugcaucaaagaauaagagagucgcgcugcaggcgcucaaaaagaaaaaacgauuggaaaaaacucaauuacaaaucgauggcacacucacuacaaucgaaaugcaaagggaggcccucgaaggagccagcaccaacacagccgucuuagauucaaugaagaaugcagcugaagcucuccaaaaagcccacaaaaacuugaaugucgaugauguccacgacaucauggaugacauagcugaacagcaugacauugccaacgagauuacuacugcuauuagccagccgguaggcuucgcugaugauuuggacgaggaugaauuagaaagcgaacuagaaaagcucgaacaagaaggauuagaggaagauuugcugaaaguuccaggcccaacugaacuaccugcuguaccuacaggagcuauugccaagcccguuaaaccugcugcuaaaaaaguggaggaugaugaugacaugaaagaauuggaagcuugggcuucauaa

SEQ ID NO: 651 - RNA, 609 nt, Phyllotreta cruciferae
augaauccugaguaugauuacuuauucaagcugcuucuuauuggcgauucuggcguaggaaaaucguguuugcuauugagauuugcggaugauacuuauacggagaguuauauuaguacuauuggaguagauuuuaaaaucagaacaaucgacuuagauggaaaaacaauuaaauugcaaauuugggauaccgccggucaggaacgauuuagaacuauaacaucgaguuacuacaggggagcgcacggaaucaucgucguguacgauugcacagaccaggacucuuucaacaacgugaaacaaugguuggaggaaaucgaccguuacgcaugcgacaaugucaauaaauuacuuguaggaaauaaaagugaucuuacgacuaagaaaguugucgauuucaauacggcuaaggaauacgcggaucaguuggggguaccauuuuuggagacgucggcgaagaacgccacgaacguagagcaggccuuuaugacgauggcagccgaaauuaaaaaucgauuaggaccgccgaccgcggccgcagaucaaggaaacaaaguuagauucgaucaaagucguccuguugaaacgacuaaaucuggauguugcuga

SEQ ID NO: 652 - RNA, 651 nt, Phyllotreta cruciferae
auggcaacaaaucgaaguggcaccgcccaaagaccaaacggcgcuacccaggguaaaaucugccaguucaaauugguguugcucggcgagagcgccgucgguaaauccagucuggugcugagguucgucaaaggccaguuccacgaauaccaagagagcaccauaggggcugcguuccucacgcagaccaucugcuuggacgacaccaccguuaaauucgaaauaugggacaccgcgggacaggaaagguaucacaguuuagcuccgauguacuauagaggggcgcaggcagcuauagugguguacgauauaaccaaucaagauacguucggcagagcgaaaacgugggugaaggagcuccaaaggcaggccagucccaccauugugauagcccuggccggcaacaagcaggauuuggcuaacaagaggauggucgaguacgaggaagcgcaaacguacgccgacgagaacgguuuacucuucauggaaacaucggcgaaaacggcgaugaacguuaacgauauauuuuuagcaauagcuaagaaacugcccaaaaaugaacaaacauccggucaagggggcagcgcccaaggaaggcgacuggcagaaggagaugcgggcgccaaggccccaggaaacugcugcaaguga

SEQ ID NO: 653 - RNA, 549 nt, Phyllotreta cruciferae
auggguaauguguuugccaauuuauuuaaaggccucuucggcaaaaaggaaaugaggauauugaugguagguuuagaugcugcugguaaaaccacaauuuuauauaaacuaaaauuaggagaaauuguaacaacuaucccaacuauugguuuuaaugucgagacuguagaauauaagaauaucagcuuuacaguaugggaugucgguggucaagauaaaauuaggccauuguggagacacuauuuucaaaauacgcagggccuaaucuuuguaguugacagcaacgacagggagcguaucaccgaggccaaagacgagcugaugcguaugcuggccgaagacgaacuccgggacgccguucuucugauauucgccaacaagcaggauuugccgaacgcuaugaacgccgccgaaaucaccgauaagcucggauuacauucguugcgcaaccguaacugguacauacaggccacgugcgccaccagcggagacggucuauacgaaggucuggauugguugucuaaucagcugaagaaugccaaucguuag

SEQ ID NO: 654 - RNA, 4491 nt, Phyllotreta cruciferae
augcaauuguacucggucgagcggaagugcucgcagccgaucgaaggccacgccgccucguucgccacguucaaaauggagggcaacccggagccgucgacgcucuucugcuucgccgucaggacgcugcagggcggcaagcugcacaucaucgaggugggccagaacccggccggcaaccagccguuucccaagaaguccguggacguuuucuucccgcccgaggcgcagaacgacuucccgguggccaugcaggucuccaccaaguacgacguuauuuacuugaucaccaaguacgguuacauucacauguacgacaucgagagcgggacuugcauauacaugaaccggauuucuagcgauacgauuuuuguaacggcuccucacgaaucuaccggugguaucaucgguguuaauagaagaggucaaguuuuaucgguaucugucgaugaggaaagcauuauuagauacauuaauacagucuugcauaacgcugaucuagcucuacguuuagcuacuagaaacaaucucgcuggugcugaagacuuauuugucaguaaauuccagaugcuuuuucaaaacgggcaauacgccgaagccgcuaaagucgcugccaacgcuccuaaaggaauccucaggacgccagcuacaauccaaauguuccagcaaguuccuacucaacccggccaaaacagcccccugcuacaauacuuugguauacuucucgaucaagggcaacuuaauagauaugagucauuggaauugugcaaaccggucuugcuucaaggacgcaaacagcucuuagaaaaauggcugaaagaagagaaauuggaguguucggaggaauugggugaucuggugaaacaggccgaucccacucuggccuuguccguguaccuuagagcaaacguuccggccaaggugauucagagcuucgccgaaaccgggcaauuccaaaagaucguccuguacgcuaaaaaaguauccuacacgcccgauuacguguuccuuuugcgacaagucaugcguaccaaccccgaucaaggugcugcuuucgccggaauguugguagccgacgaagagccucuagccgauaucaaucaaaucgucgauaucuucauggaacagaacauggugcaacaguguacagccuuucugcucgacgcuuugaagaacaacagacccaccgaagggcacuugcaaacaagauugcuggagaugaauuugaugucagcgccucagguggccgacgcgauucucggcaacaacauguucacgcacuacgaucgagcccacgucgcucagcucugcgagaaagcaggucuuuugcaaagggcccucgagcacuacaccgauuuguacgacaucaaacgggccgugguccacacucaccuguugccggccgauugguuggugaauuucuucggaacguugagcgucgaagacagcuuggaaugccucaaagcgaugcugaccgcuaacaucagacaaaaccugcagauuugcgugcaaaucgccaccaaauaccacgaacagcucaccacuaaggcucucaucgauuuguucgagagcuucaagaguuacgaagguuuguuuuauuuccucggcucgaucguuaacuucucucaagaccaggaaguccacuuuaaauacauacaggcugcgugcaaaacgggccaaaucaaagaagucgaacgcaucugucgcgaaucgaauugcuacaaugccgagcgagugaagaauuuccuaaaagaagcuaaacuaaccgaucaauugccgcuuauuaucguuugcgaucgauucgauuucguucacgauuuagucuuguaccucuacaggaacucguugcagaaguacauugaaauuuacgugcagaaagucaaucccagucgguuacccguggucgugggcgggcuuuuggacgucgauuguuccgaagacaucauuaaaaaucuaauuuugguaguuagaggacaauucucgaccgacgaauuagucgaagaagucgaaaagcgaaacagauugaaacugcuguugccuugguuggagagccguguucacgaaggaugcgucgagccugccacucacaacgcucuggcgaaaauuuacauagauuccaacaacaacgccgaacgguucuugaaagaaaaccaaugguacgauucucgcguugugggucguuacugcgaaaaacgcgauccucaccuggcuugcgucgcauacgaacgaggccaaugcgacagagaauugaucgcggugugcaaugaaaacucccuguucaagucugaggcucguuacuuggugcgcaggcgcgacggcgaauugugggcugaaguacuucaagaagcaaacccguacagacgucaguugaucgaucaaguaguucaaacggcgcuuagcgagacucaggaucccgaagauauuucuguaaccguaaaagcuuucaugacagcugacuuaccgaacgaauugaucgaauugcuggagaaaaucguuuuggauaacucuguguucucugagcacagaaaucuucagaauuuacuuauucuuaccgcaaucaaagccgaugcuacuagaguuauggauuacauuaaccguuuagacaacuacgacgcuccugauauagcgaauaucgcuauaaacaaucauuuguacgaggaagcuuucgccaucuucaaaaaguucgaugucaacacuucugcgauccaagugcucaucgaacaagucaacaacuuggaccgagcuuacgaauuugcugaacguuguaaugaaccggccguguggagccagcucgccaaggcccaacucaaccaggguuuggucaaggaagccaucgauucguacaucaaagcggacgauccuucggcuuacaucgacgugguggagaccgcuucgaagaacaacagcugggaggaucuggugcgcuaccugcaaauggccaggaagaaggccagagagagcuacaucgaauccgagcugaucuacucguacgccaagaccggccgguuggccgauuuggaagaguucaucagcggucccaaucacgcugacauccagaaaaucggcgacagaugcuucgaugauaaaauguacgacgcggccaaguuguuguacaacaacguuucgaauuucgcucgacuggccauaacgcuggugcaucugaaggaguuucaaggggcgguggacagcgcccgcaaggcuaacagcaccaggacguggaaggagguuugcuuugcuugcguagaugccgaggaguucagauuggcccaaaugugcggcaugcacaucgucgugcacgccgacgaauugcaggacuugauaaacuauuaucaagacagagguuacuucgaagaguugaucggucuguuggaggcugcccugggguuggagagggcccacauggggauguucaccgaacuggcuauauuguauucgaaauacaagccggcuaggaugcgugaacaucucgaauuguucuggucgcgcguuaauauccccaaagugcuuagagcagccgaacaggcgcauuugugggccgaauugguguuccuguucgacaaauacgaagaguacgauaacgccgugcuggccaugauggcgcauccuacugaagcguggcgcgaggggcacuucaaagacaucaucacgaaagucgcgaauaucgaauuguauuacaaggcgauccaauuuuaucucgauuucaagccgcuguuguugaacgaccuucugcuggugcuggcuccgagaauggaucacacgagggccguggcuuucuucgccaaaaccagccaccugcagcuggucaaauccuacuuacgaucuguccaaaauuugaacaauaaagcgaucaacgaggcucucaauucucugcuuauagaggaagaggacuuccaggggcucagaacguccauagacgcguucgauaacuucgauaacauagguuuagcccagagauuagaaaagcacgaauuaaccgaauuuagacgcaucgccgcuuaucuuuacaaaggaaacaaccgguggaaacagagcguggaguugugcaagaaagaccggcuguucagagacgccauggaauauacaucggagucuagaaaccaggaauuggccgaggaacuguuggcuugguucuuggacagaaaggcguaugacugcuucucugcuugcuuauaccacuguuacgaucugcuccgaccggacgucauucuggaacuggcuuggaagcacaacauaauggacuuugcgaugccguuccugauccaggugaccagggaauugaccucgaaagucgagaaauuggagcaaucggacgcucaaagacagagcgaggcggcggaggagacgaacaagccgaucaugaugcccgaaccccaacuuauguugacugcagguccuggcauggguauuccgcaacagccauacaugccucaacaaacguacgcccaagugggauaugcaccgcaaauggccuaccaagguuacccgggcaug

SEQ ID NO: 655 - RNA, 3672 nt, Phyllotreta cruciferae
auguuaaccaaguucgaaaccaaaucagcaaggguaaaaggacucucuuuccaucccaaaaggccauggauuuuagccaguuuacacaacgggugcauccaguugugggauuaucgaaugugcacucuucuggaaaaguucgacgagcacgauggacccguaagaggcauauguuuccacagccaacagccccuauucguaucagguggcgaugauuauaaaauaaaaguauggaacuacaaacagaaacguugcaucuucacucuacugggacauuuggauuacauucguacgaccauguuccaccacgaauaccccuggauaguaucagcauccgaugaucaaaccauccggauauggaacuggcaauccagaacuugcauuugcguuuuaaccggccacaaucacuacguuaugugcgcuacuuuccauccgagcgaagaucuacuguuauccgcuucauuggauucuacuguaagaguuugggauauuucuggacuacguaagaagaacguaucaccgggucccucggggcucgaagaucaccucaaaaauccuggugcuacagagcuauucggccaagccgaugcuguggugaaacacguuuuggaaggacaugaucgaggagugaauugggcaucguuucacccuuuccuaccuuuaauagcuuccggagcugaugacaggcaaauaaagcuguggagaaugaacgauucgaaagcuugggaaguagacacgugcagaggccauuauaacaaugugucuugcguuuuguuccauccaagacaggagcugauucugucuaauggugaagauagaaguauaaggguuugggauauggcuaaaaggacuugcuugcauacuuuuagaagggaacaugaacgauuuugggucaugacuagccacccgaaucuuaauuuauucgcugcuggucaugaugguggcaugguaauauucaaauuagaacgagagcgaccagcuuacacggugcacggcaaccuacuguauuacgucaaagagaaguauuuaagaaaacucgauuuuaccacuucgaaggaugucccuguuauucaaaucagaggcggcgguaaaauuccaguauacagaauguccuuuaauccagccgaaaacgcaguacuacuaucuacucgcacuucuaaucuggauaacagcacuuacgauuuguacaugauucccaaggaucaagaaagggaggaucacgugccugaagccgaaagcaagagaucuucgggucuuacagccuuguggguagcuagaaaucgauuugcuguacuggacaggacgcaccaguugaucauuaaaaaucuaaaaaacgagguaacuaaaaaaguucaaacgcccacuugcgaugaagucuuuuacgccggaacuggcaugcuuuuauugagagauuccgaacacguuaccuuguucgauguccaacaaaagaggacguuggcucaaguuaaaaucagcaaauguagauacgucguuuggucuucugauaugucgcaucuagcucuucuaucuaagcacaacgugacgauuuguaauagaaaauuggauguacugugcucguuacacgagaauaccagaguuaagucgggcgcuugggaugauagcggaguuuucauuuacacuacuaguaaucauauuaaauauacauugaaaaauggugaucauggaauuauuagaacccuggaucuucccauuuacauaaccagaguaagagguagucagguguucuguuuggacagggaauguaaaccucgccuccugguaaucgaucccacugaauacaaauucaaacucgcauugaucaaucacaaguacgaagaaguuuuguacauggucaggaauucucgauugguaggccaaaguaucauauccuacuugcaacaaaaaggauauccagaaguagcuuugcauuuuguaaaagaugacaaaacuagguuugcucuggcuuuggaauguggcaacauugaaauagcuuuagaagcagcuaaagcucuaaaugauaaaaauuguugggaucaauuggcacaagccgcauuguggcaaggcaaucaucaaaucguagaaaugugcuaccaacguacgaaaagcuucgagaaacuaucguuccucuaccuaaucaccggcaauuuggagaagcugaggaaaaugaugaaaaucgcugaaauuagaaaagccagaucgucccaauaccacgccgcuuugcugcuaggcgaucucgaagaacguguaaaacuacucaaagcuuccaaucaauuaucucuagcguauuuaaccgccgcuacccacgguaugcgagaugaggccgagcagcucaaagaacaaaucggcgaugauaaaaaacuaccagauguagauccuaacgcuaaguucuugaaacccccaccgccgauccaacaagccgaauccaacuggccuuuacucacagucagcaggaguuucuucgagaauaccgccgcugcagcgaccgcuucagccaacaugaaaucucugauggcagagccuguuuccgauguggguauggaggaugcccaaggcuggggcgaugacgacgaauuggaacuggaucccgacgagaagaaggccgaaguugccgccgccggagguggagauggcgaaggaggcugggacguggaggaugaagguuuggaaauacccgaucugggaccgacugcgacgguugaagcagaggguaauuucgugcauuugcccacacaagggccgucugcgcuuauuacuuggacgaagaauucgcaguugguggccgaucacguggcggcugguucguuugaaucggcggcuaggcugcuucacgaucaauugggggugguggauuucaggccuuucgagaguuuguucuugaacuuguacaguacuucgaagacggugucuucuuggcagcagaacgugccgccuuuguucaguuacccgucgaggaauuggaaggaagcgaaccuuaagaaccagcugcccgcuucgggggugaaauugaacgauuuggucgcuaaauugcagauuuguuaucaacugaccacuggugguaaauucacugaagccaucgagaaauuacaaacgcugcuacuguccguuacauugcuuguaguggacaauaaacaagaaauauccgaggcucagcaguuacugagaauagccagcgaauauauuugcgguuugcaaauggaaaccuugagaaaaaccuuaccgaaaacuucagccgaagagcagaaacgucagugcgagauggccgccuauuucacgcauuguaaacuacagccgauacaucaaauccucacgcuuaggacggcgcucaacauguucuucaagcucaaaaacuacaaaacggccgcuucuuucgccaagaggcuguuagaacucgguccuaggccugaaguagcccagcaagcgaggaaaauauugcaggcuugcgauucgaaucuuacagaugauuugcaauugcaguaugacgagcacaauccuuucaacuugugugggcacucuuauacaccuauuuauaggggaaaggcugaagagaaauguccauuaugcgguacuucuuauuuaccuaaauauaaagggguauuguguaauauuugcaaaguggcggaaguuggaaaggauacgauuggauugaggauuagcacgcaucaguucagguaa

SEQ ID NO: 656 - RNA, 546 nt, Phyllotreta cruciferae
  misc_feature (478)..(478): n is a, c, g, or u
augggccgauacgcucgcgaacccgacaaugcggcgaagucuugcaaagccagaggcuccaaccuccgaguccacuucaagaauacgugcgagacggcgaacgccauaaggaagaugccccucaagagggccguggccuacuugaagaacguugucguccagaaagaguguauuccauuuaggagauucaacggaggcgucggccguugugcccaagccaagcaauucggcaccacgcagggcagguggcccaagaaguccgccgaauuucuauuacagcuccucaggaacgccgagagcaacgcagacuacaguggacucgaugucgauaggcuagucguagaacacauccaaguuaacagagcugcuuguuugagacgucguacguacagggcucacgguaggaucaaucccuacaugucgucgcccugccauaucgaacucugguuaaccgaaggggaaucgucaccugaagcgngccuaagaagagcaacaaaaagaaggcaacggagaagaagagacccaagucguccguugcugcaguag

SEQ ID NO: 657 - RNA, 315 nt, Phyllotreta cruciferae
auggugaacguuccgaaacaaaggcguacauuuugcaagaaaugcaaaguccacaagcugcacaaagugacgcaguacaagaaauccaaagaacgucacgcugcccaggguagaaggcguuacgacagaaaacagcaagguuucgguggucaaacuaaacccaucuucaggaagaaggcaaaaaccaccaagaaaaucguguugaggauggagugugcggacugcaaguacaggaagcaguucccuuugaagagaugcaagcacuucgaacuugguggugacaagaagcgcaagggccagaugauccaguucuaa

SEQ ID NO: 658 - RNA, 1251 nt, Phyllotreta armoraciae
aacguguggccguccagcaggauugaagccacucguuuggugguaccauuagccugucucuaucagccuaucaaagaacgaguagaucuuccuaccauacaauacgauccaguauugugcacaaggaacaacugcagggcuauuuuaaauccacugugucaagucgauuaucgagcuaaauuauggguuugcaacuucuguuuucaaaggaauccauuuccucaacaauaugcagcuaucucugaacaacaucaaccugcugaauuaaugccaauguucucgacuauugaguacacaauuaacagaguucauuguuuaccucccauauuccuguauguugucgauacuugcauggaugaagaagaauuagguucucuuaaggacucguugcaaaugucguugaguuuguuaccgcaaaacgcuuugauuggccugauuacauuuggaaaaaugguucaaguucaugaauuggguacugaaggugucagcaaaucguacguauuccgaggaacuaaagaucuuacggcuaaacaaguucaggaaauguuggguauugguaaagucgcaauggcucaacaacaaccacaaccgcaacaaccuggacaaccuaugagaccaggacaaccucaaucugcaccugucccaccugguagcagauuccugcaaccuauuucaaagugugauaugaauuuaacggauuuaauaggagaacaacagaaagauccuuggccugugcaccaagguaaaaggccacugagaugcacugguguugcauuaucgauugcuaucggcuuauuggagugcacuuaugcaaauaccggagcuaggguuaugcuuuuuguuggggguucuugcucacaaggcccaggucaaguuuugaaugacgauuugaaacaaccuauuaggucccaucacgauauccaaaaagauaaugcaaaauauaugaaaaaagcuauuaagcauuacgauacuuuagcgaugagagcagcgacuaauggucacugcauugauauuuauuccugugcacucgaucaaacugguuuaauggaaaugaaacaaugugcaaauucuacagguggucacauggugaugggagacucuuuuaauucaucgcuguucaaacaaacauuccaaaggguguucacuagagaucagaaaaacgauuugaaaauggcuuuuaauggaacauuagaagugaaauguucucgagaauuaaaagugcaaggaggaauuggauccuguguaucauua

SEQ ID NO: 659 - RNA, 309 nt, Phyllotreta armoraciae
ggucccaucacgauauccaaaaagauaaugcaaaauauaugaaaaaagcuauuaagcauuacgauacuuuagcgaugagagcagcgacuaauggucacugcauugauauuuauuccugugcacucgaucaaacugguuuaauggaaaugaaacaaugugcaaauucuacagguggucacauggugaugggagacucuuuuaauucaucgcuguucaaacaaacauuccaaaggguguucacuagagaucagaaaaacgauuugaaaauggcuuuuaauggaacauuagaagugaaauguucucgagaau

SEQ ID NO: 660 - RNA, 924 nt, Phyllotreta armoraciae
guucaaacgcuggaagggcaugggcaaaacgugaccgccguuuguuuccauccggaauuaccgaucgcucucaccggcagcgaagacgguacggucagaguguggcacgcaaacacccaucgauuagagagcaguuugaacuacggcuucgaacggguguggaccauuuuuugcuugaaaggcuccaauaaugucgcucucgguuacgacgaaggcagcauucucguuaaagucgguagagaagagccggccgugagcauggacgcgagcggagggaaaaucaucugggcuaggcauucggaguuacagcaggccaaucugaaagccuuacccgaaggagcugaaauaagagacggggaacguuugccggucuccaucaaagauaugggcgcuugcgacauuuacccucaaacuauucagcacaaucccaacggccgguucgugguuguuugcggcgauggagaauacaucauuuacacugccauggcgcucaggaacaaagccuucgguagcgcgcaggaguucguuugggcgcaggauuccagcgaauacgccaucagagagucgggaucuaccaucagaauauucaagaacuucaaagagaagaagaauuuuaaaucagacuuuggagcugaaggcaucuacggugguuaucuguugggcguaaagucuguauccggauuggcuuucuacgauugggaaacucuggauuugguuagaaggaucgaaauacaaccucgcucgauauacugguccgauagcgguaaacuaguuuguuuggccaccgaggacaguuauuucauacuaucuuaugacguugaugaaguucagaaagcgagggauaacaaccagguggcagaugauggaguggaguccgccuucaauguccuaggugaaguaaacgagucuguucguacaggucuc

SEQ ID NO: 661 - RNA, 744 nt, Phyllotreta armoraciae
cgaauuuuugcgaggaucaacauuaagauuucuaugcaagcuaaaggagcccgagcuguuggagccucugaugcccagcauucgaauuugccucgagcacaggcacagcuacguuagaaggaaugcuguucuggcaauuuuuacgauuuacaagaauuuugaauuucucauuccugacgccccugaauugauuucuacuuaccuagacggcgaacaagauaugucuugcaaaagaaaugcuuuucuuaugcucuugcacgccgaucaagaucgagcucucacuuaccuauccaauugcuuagaucaagucgcuucguuuggggauauccuacaguugguuaucguugaauugauauacaaagugugccacuccaacccuaccgaaagaucccgguuuauucgaugcauauacaauuuauugaauucgagcaguccugcuguuagguacgaggccgccgguacucugauuacuuuguccagcgcuccgacagcuauaaaagccgccgccaguuguuacaucgaauugaucauuaaagagagcgacaacaaugucaaauugaucguuuuggauagauugauugccuugaaggaacaucccagccacgagaggguccugcaggacuugguuauggauauauugagagugcuaucggcuccugauuuggaagugcgaaagaaaacgcuuaauuuagcgcucgaauuggugucgucucguaacgucgaagaaaugguguuugugcugaa

SEQ ID NO: 662 - RNA, 513 nt, Phyllotreta armoraciae
caacuagaagauggccguacucuuucugauuacaacauccagaaggaauccacucuccacuugguacucagacuucgugguggaaugcagaucuucgugaaaacuuuaaccggaaagacuaucaccuuggaagucgagccauccgacaccauugagaaugucaaagccaaaauucaggacaaggaagguaucccaccagaccaacagagauugaucuucgccggaaaacaacuagaagauggccguacucucucugauuacaacauccagaaggaauccacucuucacuugguacucagacuucguggugguaugcagaucuucguaaaaacucuuaccggcaagaccauuacucuugaagucgaaccauccgacacaaucgagaauguuaaggcuaaaauucaggacaaggaagguaucccaccagaccagcagagauugaucuuugcugguaaacaacuugaagauggccguacucuuuccgauuacaacauccaaaaagaaucuacauug

SEQ ID NO: 663 - RNA, 228 nt, Phyllotreta armoraciae
uuggaagucgagccauccgacaccauugagaaugucaaagccaaaauucaggacaaggaagguaucccaccagaccaacagagauugaucuuugccgguaagcaauuggaagauggccguacucuuuccgacuacaacauccagaaggaaucuacucuucacuugguuuugagacuucguggugguaugcagaucuucguaaaaacucuuaccggcaagaccauuacu

SEQ ID NO: 664 - RNA, 489 nt, Phyllotreta armoraciae
ggcccaaagcauaauuguuaugaaaacagacgaaaauaagcuguuuaaauugucuaacaagcuuguuauggcuguaucgggagagucuggugauacuacccaauuugccgaguauauugcuaagaauauucagcuguauaaaaugagaaauaccuacgaacuuagcccaucggaagcagcaucguuuacucguaggaaucucgcugaugcucuuagaagcaggagucccuaucacguaaauuugcuacuagcuggauacgacgauaaagaaggcccucaauuguacuacauggacuauuuggcgucgaccauuaaaguuaauuaugcugcucacgguuacggaggcuucuucucguuauccaucauggauagaaacuacaucaaaucucugagcagagaagaaggcuacgaguuguugaaaaaaugugugaaagaaguucagaaaagauuaaucaucaauuuacccaacuuuaagguacagugugucgg

SEQ ID NO: 665 - RNA, 410 nt, Phyllotreta armoraciae
cgaagaaggccaagaaagguuuuaugaccccugaaagaaagaagaaacuuagguuauuguugagaaagaaagccgccgaggaauuaaagaaggaacaggaaaggaaagcggccgaaagaagacgcaucaucgaagagcgcuguggaaagcccaaauugaucgaugacgccaaugaaggccaacuuaagaagauuugcaaagacuauuaugaccgcauguauauaugugaggagcagaaaugggauuuggaacgcgaaguucgaaaacgggacugggagaucgcggaauugaacagucaagugaacgaccucagaggaaaauucgugaaacccacguugaagaagguguccaaauacgagaacaaauucgccaaguugcagaagaaggccgccgaauuuaacuuccgcaac

SEQ ID NO: 666 - RNA, 566 nt, Phyllotreta armoraciae
aagucaaggcuaccaagaagccacagaagccucacguuaucgaaaaaccaauuaacggagaaaagaacggaggaaaaagauuugucuuagucaagaaacguagggcuuacuauccuacucaagacaagauuaagccgaggccugcgaagaaguccuucugccagcacaaacguucacuuagaacuaccauuacacccgguacuguucuuauuuuguuggccgguucccacaagggcaagaggguaguuuuccuuaaacaacuuuacucuggucuucuacuuguuacugguccguuuucaauuaaugccuguccuuugagacguauuagucaacgauacguuaucgcaacaucuaccaaaaucgaugucagcgguauuaaaguucccgacaccuuuaacgaugacuauuucgcaaggaaacgcgucaagagggcaaagaaagaagaaggugauauuuuccagaccaagaaagagguuuacaaaguaagugaggaaaggaaaaaggaccagaaggaaaucgacgcgcaggugaucgcugcgaucaaaaaacacccugaccauaaaguc

SEQ ID NO: 667 - RNA, 513 nt, Phyllotreta armoraciae
guuauaggagccgauucucguacaaccacuggggcguacaucgcaaacaggguguccgauaaacuaacgagaguaaccgaucacauuuacugcugcccggucagguucugcugccgauacggaggccaucgcagacaucguaggcuaccauuugaacuuccacgggauggaauugggcgaagagccgagcguagaagugggagcagccauauucaaggagcugugcuacaacuacagggacucucugauggccggcauacucguagccgguugggauaagaagaaaggcggccagauauauuccauuccgaucggcgggaugugcgugagacaggaagugucgaucgguggauccgguucgagcuacguguacgguuacauggacgccaauuacaaaccgaaaauguccaaagaagauugcguuaaauucgucacuaauacuuuggcucucgcuaugucuagagaugguucuuccggugguguaaucagauuagguaucauuacggaggaagg

SEQ ID NO: 668 - RNA, 319 nt, Phyllotreta armoraciae
ugauacucuuugccaacgucuugcaaugggcccucggcggcgcaaucuuugcccuuugccuuuggaugagguucgaggagggcauccaagaauggcugcaaaaauuggauuccgaacaauuuuacaacggaguuuauguacuuauagucgcuucgcugaucgucaugauuguguccuuucugggauguauuagugcccugcaggagaauacggugacccuuuuggccuacaucggcacgcaaguucugagcuucauauucgguuuagccgggucggcuguucuucuggauaacagcgccagagauucccacuuccagcc

SEQ ID NO: 669 - RNA, 747 nt, Phyllotreta armoraciae
aucacacaagccgaugauguuaucaguaugcuuaccuacgcuuuccaaguggcgaugagucuaauucagaaucgagcauuucgcaauaccgucuuaagaucucuaguuggcuuguaccgcgguuuaacuacuccggacuacguuaacaugugccaaugucugaucuucuuggacgauccgcuaucaguugcggaaauuuuggauaaauuagucucugguaaagaagaguccgaauugauggcuuaccaaauagcuuuugaucucuaugaauccgcaacgcaacaguuuuuggaacgaguuuuggucgcgcuuagagcuaccgcucccauaccuucgcuauuagaggaaaaggucaaaucuaaaagcgccgaacaaucuaguagcacuucugcagaggcccccaaagauccuguuagcagugaaacuaaaagcgaggcgaaagaagaaaagucuauugagggauugacugagagugaaaaggaacaucaaaagcgaaucgaaaaauugcauaccaucuuaucgggcgaaguaucgauagaacuucaucuucaauuucugauuagauccaaccacgccgaucuucuuauucugaagcaaacgaaagaaacgguucgaguuaguauuugucacacugcuacagucaucgcuaacgcuuucaugcacagcgguacuaccagcgaucaauuuuuaagggauaauuuggaauggcuagccagagcaacgaauugggcgaaacuaacagcaaca

SEQ ID NO: 670 - RNA, 252 nt, Phyllotreta armoraciae
agacaccaucgaaaaugucaaagcgaaaauucaagauaaggaaggaauuccucccgaccagcagcgauugauuuuugcagguaaacaacucgaagauggccguacccuuucagauuacaacauccagaaggagucuacucuccacuuggugcugcguuugagaggaggaaucaucgagcccucucugcgucuuuuggcccaaaaguacaauugcgacaagaugauuugccgcaaauguuacgcuagacugca

SEQ ID NO: 671 - RNA, 1094 nt, Phyllotreta armoraciae
ccgcuauacgugcuuuaugcagcauuaccgaugcuaccaugcugcaagccaucgaacgcuacaugaaacaagccaucgucgauagaaauucugcugucaguucggcagcauuggucaguucuuugcacaugaccaaaauggcaccugaagugguuaagagauggguaaacgaagcgcaggaagcuauuaauagugauaaugugauggugcaauaucaugccuuggggcuccuguaucacaucagaaaaacagauaggcuggcuguuacaaaauuaauagcuaaacuaaccagaacuacucugaaaucuccauacgcuguuugcaugcucaucagaauaauagccaagcuacucgaagaagaagauucuggcaaugauuuucccuauuuugauuucaucgaaucuugccuaaggcacaaaucugagaugguaguuuacgaagcagcccacgccaucguuaaucucaaagguaccacuagcaaagaacuggcgccggcugugagcguauuacaauuguucugcgguucaccgaaggcuacuuugagauucgccgccguuagaacucugaaucaaguggccauaucucauccggccgcugugacggcuuguaauuuggauuuggagaauuugauuacugauucuaaucgaucgauagcuacucuugcuaucacuacuuuauugaaaacuggugcugaaucguccguugaucgucugaugaaacaaauagcgaguuuugugucugaaauuagcgaugaauucaaaguuguaguaguccaagcgaucagagcgcuggcucuuaaauucccucgaaagcacaacacucucaugaacuuuuuaucggcuaugcuaagagacgaaggcgguuuggaauacaaagcuuccauugcagacaccauaaucacuauaaucgaagauaaucccgaagcuaaagaaucugguuuggcucaucugugcgaguuuauugaagauugcgaacacguuucuuuagcuguuagaauauugcaucuguuggguagagaaggaccgaaaaccaagcaaccuucuagguacauccguuucaucuacaaucgcgucaucuuagagugcccuuccauc

SEQ ID NO: 672 - RNA, 652 nt, Phyllotreta armoraciae
aaugcgcuguaguuaaaacguccacgagacagaccuauuucuuacccgugauaggacuagucgaugaggagaaacuaaaaccgggagaucuagugggagugaacaaagacucuuaucuaauuuuggaaacauuacccgcagaguacgaugccagagucaaggccauggaagucgaugagaggccuucugaacaguauuccgauaucggagguuuagauaaacaaauacaggaacuuauagaggcuguuguacuaccuaugacucauaaagacaaguucguuaauuugggaauucauccuccuaaagguguucuacuuuacggccccccagguaccggaaagacccuccuagccagagccugcgccgcccaaacuaaaucaaccuuucucaaacuggccgguccucaguuaguccagauguucauaggcgacggcgccaaguuaguccgggacgccuucgccuuggccaaagagaaagcccccgcuauaauauucaucgacgaauuggacgccaucgguacgaagcgauucgacucugagaaagccggcgacagggaaguccaaagaaccauguuggagcugcugaaccaacuggacgguuucaguucgaccuccgacaucaaagucauagcagcuacuaaucgcguggauau

SEQ ID NO: 673 - RNA, 527 nt, Phyllotreta armoraciae
ggagaagcuauccaaaagcucagggaaaccgaggacauguuauauaaaaaacaggaguuuuuagaaaagaaaauagaggaauacacauuaguagccaaaaaaaaugcaucaaagaauaagagaguugcgcugcaagcgcucaaaaagaaaaaacgauuggagaaaacucaauuacaaauagauggaacacucacuaccauugaaaugcaaagggaggcccucgaaggggccagcaccaacacagccgucuuagacucuaugaagaaugcugcugaagcccuacagaaagcacacaaaaacuugaauguugaugauguccacgauaucauggaugacauagcugaacagcaugacaucgccaacgaaauuacuacugcuauuagccagccgguuggcuucaacgaugauuuggaugaggaugaauuagaaagugaacuagagaagcucgaacaagaaggauuggaggaagauuuacugaaaguucccggcccaaccgaauuaccugcuguaccuacaggagcuauugc

SEQ ID NO: 674 - RNA, 485 nt, Phyllotreta armoraciae
gcuauugagauuugcggaugauacuuauacggaaaguuauauuaguacuauuggaguagauuuuaaaaucagaacaaucgacuuagauggaaaaacgauuaaauugcaaauuugggauaccgccggacaggaacgauuuagaacuauaacaucgaguuacuacaggggcgcgcacggaaucaucgucguguacgauugcacagaccaggacuccuucaacaacgugaaacaaugguuggaggaaaucgaccguuacgcaugcgacaacgucaauaaauuacuuguagggaauaaaagugaucugacgacuaagaaagucgucgauuucaauacggccaaggaguacgcggaucaguugggcguaccauuuuuggagacgucggcgaaaaacgccaccaacguagagcaggccuuuaugacgauggcggcggaaauuaaaaaucgauuaggaccgccgaccgcggccgcagaucaaggaaacaaag

SEQ ID NO: 675 - RNA, 505 nt, Phyllotreta armoraciae
ucaguucaaauugguguugcucggcgagagcgccgucgguaaauccagucuggugcugagguucgucaagggccaguuccacgaguaccaggagagcaccauaggggcugcuuuccucacgcagaccauuugcuuggacgauaccaccguuaaauucgaaauaugggacaccgcgggacaagaaagguaucacaguuuagcuccgauguacuacagaggggcgcaggcagcuauagugguguacgauauaaccaaucaagauacguucggcagagcgaaaacgugggugaaggagcuccagaggcaggccaguccgacgauugugauagcccuagccgguaauaagcaggauuuggcuaacaagcggaugguggaguacgaggaggcgcaaacguacgccgaugaaaaugguuugcuguucauggaaacaucggcgaaaacggcgaugaacguuaacgauauauuuuuagcaauagcuaagaaacugcccaaaaaugaacaaaca

SEQ ID NO: 676 - RNA, 406 nt, Phyllotreta armoraciae
augguagguuuagaugcugcugguaaaaccacaauuuuauauaaacuaaaauuaggagaaauuguaacaaccaucccaacuauugguuuuaaugucgagacuguagaauauaagaauaucagcuucaccgugugggaugucgguggucaggauaaaauuaggccauuguggagacacuauuuucaaaauacccagggccuaaucuuuguaguggacagcaacgacagggaacguaucaccgaggccaaagacgagcugaugcguaugcuggccgaagacgagcucagggacgccguucugcugauauucgccaacaagcaggauuugccgaacgcuaugaacgccgccgaaaucaccgauaagcucggacuacauucguugcgcaaccguaacugguacauacagg

SEQ ID NO: 677 - RNA, 785 nt, Phyllotreta armoraciae
acucguugcagaaguacauugaaauuuacgugcagaaagucaaucccagucgguuacccguggucgugggcgggcuuuuggacgucgauuguuccgaagacaucauuaaaaaucuaauuuugguaguuagaggacaauucucgaccgacgaauuagucgaagaagucgaaaagcgaaacagauugaaacugcuguugccuugguuggagagccguguucacgaaggaugcgucgagccugccacucacaacgcucuggcgaaaauuuacauagauuccaacaacaacgccgaacgguucuugaaagaaaaccaaugguacgauucucgcguugugggucguuacugcgaaaaacgcgauccucaccuggcuugcgucgcauacgaacgaggccaaugcgacagagaauugaucgcggugugcaaugaaaacucccuguucaagucugaggcucguuacuuggugcgcaggcgcgacggcgaauugugggcugaaguacuucaagaagcaaacccguacagacgucaguugaucgaucaaguaguucaaacggcgcuuagcgagacucaggaucccgaagauauuucuguaaccguaaaagcuuucaugacagcugacuuaccgaacgaauugaucgaauugcuggagaaaaucguuuuggauaacucuguguucucugagcacagaaaucuucagaauuuacuuauucuuaccgcaaucaaagccgaugcuacuagaguuauggauuacauuaaccguuuagacaacuacgacgcuccugauaua

SEQ ID NO: 678 - RNA, 739 nt, Phyllotreta armoraciae
cgaacuagaacuggauccugacgagaagaaggccgaagucgccgccgcaggaggcggugauggcgaaggcggcugggacguggaggacgaagguuuggaaauccccgaucucggaccgaccgcaaccguagaagcagaaggcaauuucgugcauuuacccacucaagggccgucuccgcuuauuguuuggacgaagaauucgcaguugguggccgaucauguggcugcggguucauucgaaucggccgccagguugcuucacgaucaauuaggaguggugaauuucaggccuuucgagaguuuguuuuugaauuuguacaguacuucgaagacggugucuucuuggcagcaaaacguaccgccuucguucaguuacccguugaggaauuggaaggaaggaaacguuaagaaucagcugcccgcuucgggagugaaauugaacgauuuaguagcaaaauugcagauuugcuaucaauugacgaccggugggaaauucacggaagccaucgagaaauugcaaacucugcuguugucaguuacgcuucucgugguugauaacaaacaggaaauuuccgaggcucagcaguuacucagaauagccagcgaguauauuugcgguuugcaaauggaaacuuugaggaaaacucuaccgaaaacuucggccgaagagcagaaacgccagugugaaauggccgcguauuucacccauuguaaauuacagccgauacaucaaauccuc

SEQ ID NO: 679 - RNA, 438 nt, Phyllotreta armoraciae
ccaaccuuagaguccacuucaagaauacaugcgagaccgcgaacgccauaaggaagaugccccucaaaagggcaguagccuauuugaagaaugucgucauucaaaaagaguguauuccauuuaggagguuuaacggaggaguuggucguugugcucaagccaagcaauuuggcacgacacaggguagauggcccaagaaguccgcggaauuucuguuacagcuccucaggaacgccgagagcaacgcagauuacagugggcuugaugucgauaggcuaguuguagaacacauucaaguuaacagagcugcuuguuugagacgucguacguacagggcucacgguagaaucaauccguacaugucgucucccugucacaucgaacucugguuaaccgagggagaaucgucaccugaagcucccaagaagagcaacaaaa

SEQ ID NO: 680 - RNA, 177 nt, Phyllotreta armoraciae
aaaauccaaagaacgucacgcuucgcaggguagaagacguuacgacagaaaacagcaggguuucgguggucagacuaaaccuauuuucaggaagaaggcaaaaaccaccaagaaaaucguguugaggauggagugugcugauugcaaguacaggaugcaguuccccuugaagagaug

SEQ ID NO: 681 - RNA, 745 nt, Phyllotreta cruciferae
ugacgauuugaaacagccuauuaggucccaucaugauauccaaaaagauaaugcaaaauauaugaagaaagcuauuaagcauuaugauacuuuagcgaugagagcagcgacuaauggucauugcauugauauuuauuccugugcacuugaucaaacugguuuaauggaaaugaaacaaugugcuaauucaacagguggucacauggugaugggagauucuuuuaauucaucgcucuuuaaacaaacauuccaaaggguguucacacgagaucagaaaaacgauuugaaaauggcuuuuaacggaacauuagaagugaaauguucucgagaauuaaaagugcaaggaggaauuggauccuguguaucauuaaacgucaaaagucaacuggucucugacacagaaaucggcaugggcaacacuguacaauggaaaauguguacgcuuacuccaagcacuacgauggccuuguucuucgaagucgucaaucagcauucugcgccaauuccgcaaggaggaagagguugcauacaauuuauuacucaauaucaacacucaaguggucaaagaaggauuagagugacaacaguggcucgaaacugggcugaugccacuacuaauauccaccacaucagcgcugguuuugaucaggaagcagcagcuguaauuauggccagaauggcuguuuauagagcugaaucagaugagagucccgacguucugagaugggucgauagaaugcugauu

SEQ ID NO: 682 - RNA, 765 nt, Phyllotreta cruciferae
aggaucgaaauacaaccucgcucgauauacuggucugauagcggcaaacuaguuuguuuagccaccgaagauaguuauuucauacucucuuaugaugcugaagaaguucaaagagcaaaggauaauaaccagguggccgaugauggaguggaguccgccuucaaucuacugggugaagugaacgagucuguucguacaggucucuggguaggagauugcuucauuuacacaaacgccguaaaccguaucaauuacuucgucggaggugaauuggugaccaucgcacaucuggauggcccauuguacguacugggcuauguuccaaaggaugauaggcucuauuuagucgacaaagaauuaagaguggucagcuaucagcugcuccuuucggucuuagaguaccaaacugccguuaugagaagagacuucucgacagcugacagaguguugccuucgauuccuaaggaacaccgaacgagaguggcucauuucuuggaaaagcaaggcuucaaacaacaagcucuggccgugagcacugauccugaacacagguucgaacuggcuguagcuuuggaggauuugaauaccgccaagaugcuggcucaggaagcuaacaauccgcagaaauggagccagcuggccgauuuagcggcguccacgaauaaucucguguuggccaaagagugcaugcagaaagcccaagauuacgguggauuauugcucuuggcuaccaguucuggagaugacgagguagugaggacauua

SEQ ID NO: 683 - RNA, 704 nt, Phyllotreta cruciferae
ucuuuggccucuacuuugaccaaauuggcuuuaagauauggugaaaacguuuccgcuuccgauaggaauaaauucgacgcugaaguuaugcuuauuauggcuggcauuuugcauuuaggcaaaucagguuugccgguaaaacagauaacuaacgacgacaacgaccacauucucuucugccugcgcgugcuauccgaucgcacggagcccgucguccaaguauucucgagccugugccgcaacgcccucaacgacaugcugcuggccaaggaaaccgaagaggcgaccgaucagaaaucgcgagagaaaucccgagccgccguccaaaccgacgacgccaucaccuucgugcaacuggaguccgaccgaagcggcgagcucggcgaaaacgucuucgaaaccucccugucgcaggcccuaaugggcggcaagacggggcaaucggacuccaccaucggcucgaguaaauugaacaagaucgcccaguugacggguuucucggauccuguuuacuccgaagcguaugugcacguuaaucaguacgauaucgugcuggacguguugguggugaaccaaacgagcgacacgcugcagaauuguacucuggaguuggcgacucugggcgauuugaaguugguggagaagccucagccggucguucuggcgccgaaggauuucugcaauaucaaggcuaacgugaaagu

SEQ ID NO: 684 - RNA, 704 nt, Phyllotreta cruciferae
  misc_feature (566)..(662): n is a, c, g, or u
acaccaucgagaaugucaaagcuaaaauucaggacaaagaagguaucccaccagaccaacagagauugaucuucgcugguaaacaauuggaagauggccguacucuuucugauuacaacauccagaaagaaucuacucuucacuugguuuugagacuucguggugguaugcaaaucuucguaaaaacucucaccggcaagaccaucacccuugaagucgagccaucugacacuauugagaauguuaaagccaagauccaggacaaagaagguaucccaccagaccaacaaagauugaucuucgcuggaaagcaauuggaagauggccguacucuuucugauuacaacauccagaaggaaucgacccuucacuugguuuugagacuucgugguggcaugcagaucuucguaaaaacucuuacuggaaaaaccaucacccuugaagucgagccauccgacacuauugagaauguuaaagccaagauccaggacaaagaagguaucccaccagaccaacaaagauugaucuucgccggaaagcaauuggaagauggccguacucuuucnnnnnnnnnnnnnnnnnnnnnnnnnnnnnnnnnnnnnnnnnnnnnnnnnnnnnnnnnnnnnnnnnnnnnnnnnnnnnnnnnnnnnnnnnnnnnnnnncagagauugaucuucgcaggaaaacaauuagaagauggccgu

SEQ ID NO: 685 - RNA, 491 nt, Phyllotreta cruciferae
ggcccaaagcauaauuguuaugaaaacagacgaaaauaagcuguuuaaauugucuaacaagcuuguuauggcuguauccggagaauccggcgauacuacccaauuugccgaguacauugcuaagaauauccaguuguauaaaaugagaaauaccuacgaacuuagcccaucggaagcagcauccuuuacucguaggaaucucgcugaugcucuuagaagcagaaguccuuaucacguaaauuuguugcuggcuggauacgacgagaaagaaggcccccaguuauacuacauggacuacuuggcgucgaccaucaaaguuaauuacgcugcucacggcuacggaggguucuucucguugucuauaauggacagaaacuacgucaaaucgcucaguagagaagaaggcuacgaguuguugaaaaaaugcgugaaagaaguucaaaaaagauuaaucaucaauuuaccuaacuuuaagguacaguguguaggca

SEQ ID NO: 686 - RNA, 338 nt, Phyllotreta cruciferae
gccgaggaauuaaagaaggaacaggaaaggaaagcggccgagaggagacgcaucaucgaagaacgcuguggaaagcccaaacugaucgaugacgccaaugaagaacaacuuaagaguauuuccaaagcguaucacgagagaauuugcaagcuggaagaccagaaauucgauuuggaauaucuagucaaaaagaaagacauggagaucgcggaauugaacagccaaguaaacgaccucagaggaaaauucgugaaaccgacguugaagaaggugucgaaauacgagaacaaauucgccaaguugcagaagaaggccgccgaauuuaacuuccgcaacca

SEQ ID NO: 687 - RNA, 645 nt, Phyllotreta cruciferae
uaggaaauggcguuaugagguuuucaagaaccaagauguuccacaagaaggcuuuauauaaauuuauuggcaaaaaaguuaaggcuaccaagaagccgcaaaagccucacguuaucgaaaagccaauuaauggagaaaagaacggaggaaagagauucgucuuagucaagaaacguagggcguacuauccuacucaagacaagauaaagccgaggccugcaaagaaauccuucugucagcacaaacgcucgcucagaacuaccaucacuccugguaccguucuuauuuuguuggcugguucccacaagggaaagagggucguuuuccugaaacaacuuuacucuggccuuuuacuugucaccgguccguuuucuauuaaugccuguccguugagacguauuagucaacgauacguuauugcgacaucgaccaaaauugauguuagcgguauuaaaguucccgacaacuuugacgaugacuauuucgcgaggaaacgcgucaagagggcaaagaaagaagaaggugauauuuuccaaaccaagaaagagguuuacaaaguaagugaggaaaggaaaaaggaccagaaggaagucgauucacaggugauggcagcgaucaaaaaacauccugaucguaaaguucugc

SEQ ID NO: 688 - RNA, 610 nt, Phyllotreta cruciferae
uaccggaacuuccauuauggcaucagaauucgacgguggagucgucauaggagccgauucacguacaaccaccggggccuacaucgcaaacagagucucugacaaacuaacgagagucacugaucacaucuacugcugccggucgggcuccgcugccgauacggaggccaucgcagauaucguaggauaccauuugaacuuccacgggauggaauuaggggaagagcccagcguagaaguaggagcugcuauauucaaggagcugugcuacaauuacagggacuccuugauggccgguauacucguagcagguugggauaagaagaaagggggccagauuuauuccauacccauugguggaaugugcgugagacaggagguguccaucgggggguccggaucgagcuacguguacggcuacauggacgccaauuacaaaccgaaaaugucuaaagaagauugcguuaaauucguuacuaauacuuuggcucucgcaaugucuagagaugguucuucuggcgguguaaucagauuagguaucaucacggaggaagguauagaacguaggguuguauuagguaacgaauugcccaaauuuuacgaaggcuaa

SEQ ID NO: 689 - RNA, 612 nt, Phyllotreta cruciferae
auacucuuugccaacgucuugcaaugggcccucggcggcgcaaucuuugcccuuugccuuuggcugagguucgaggagggcauccaagaauggcugcagaaauuggauuccgaacaauuuuacaacggaguuuauguacuuauagucgcuucgcugaucgucaugauuguguccuuucugggauguauuagugcccugcaggagaauacggugacccuuuuggccuacaucggcacgcaagugcugagcuucauauucgguuuagccgggucggcuguucuucuggauaacagcgccagagauucccacuuccagccgaggauucgggagagcaugcgacgucuuaucaugaaugcucaucacgagccauccagaguaacgcucgccaugauucaggaaaauaucggcugcugcggugcugacggagcagaagauuacuuggcgcugcaacagccauuaccgagccaaugcagggacaccgucaccgguaaucccuauuuccacggaugcgucgacgagcucacgugguucuucgaggagaagugcgccuggauagccgcauuggccaugugcauuugcuucuucaacguuuuuaacaucgugcuuuccacu

SEQ ID NO: 690 - RNA, 679 nt, Phyllotreta cruciferae
caguuagcugcuuuaguugcuaguaaaguguacuaucaucugggugcauuugaagacucauuaacguacgcuuugggagcuggugaucucuucgacguaaaugcuagaacagaauauguugaaacaacacuugcaaaaugcaucgacuucuauacacaacaacgcaucgccuuagcagaaggugcaaccgaugcgaaaccuauugauucgagacucgaagcgauuguaaaccgaauguuccaacguuguuuggaugacgggcaaaaccgccaggcuauggggcucgcuuuagagaccaggagaauggauaucuucgaauuaucuaucacacaagcugaggauauuauuaguaugcucaccuacgcuuuccaaguggcgaugagccuaauucagaauagggcauuucguaacacuguuuuaagaucguugguuggcuuguaucgcgguuugacuacaccagauuacguuaacaugugucaaugucuaauuuucuuggacgaugcacuaccagucgcagaaauauuggauaaguuagugucugguaaagaagagucugaguugauggcuuaccaaauagcuuuugaucuuuaugagucagcaacgcaacaguuuuuggaaagaguuuugguugcccuaagagcuacugcucccauuccuucgcuguuagaggaaaagguga

SEQ ID NO: 691 - RNA, 250 nt, Phyllotreta cruciferae
agacaccaucgaaaaugucaaagcuaagauucaagauaaggaagguauuccucccgaccagcagcgauugauuuucgcagguaaacaacuggaggauggccguacccuuucagauuacaacauccaaaaggagucuacccuccacuuggugcuccguuuuagaggaggaaucaucgagcccucucugcgucuucuggcccaaaaguacaauugcgacaagaugaguugccgcaaguguuacgcuagacua

SEQ ID NO: 692 - RNA, 686 nt, Phyllotreta cruciferae
acgaaacaucagugaauccaagaaaaugcacccuaauucucaccaaauugcuuuaccuacuaaaucagggggaagcuuuaaacguaaaagaagcaacagacguuuucuucgcaaugaccaaacuauuccaaucgaaggacguaauacuucgaagaaugguguaccuaggcaucaaagagcugagcucgaccgcagacgauguaaucauaguaacuucgagccucaccaaagauaugaccggcaaagaagacauuuacagagcagcugcuauacgugcuuuaugcagcaucaccgaugcuaccaugcuacaagccaucgaacgguacaugaagcaagcaaucguagauagaaauuccgcugucaguucagccgcauuggucagcucuuugcacaugaccaaaauggcaccugaaguggugaaaagauggguaaacgaagcacaggaagcuauuaauagugauaauguaauggugcaauaucacgccuuggggcuccuauaccacaucagaaaaacagauagguuggcuguuacaaaauuaauagcuaaacuaaccagaacuacccugaaaucuccuuaugcuguuuguaugcuuaucagaauaauagccaagcuccucgaagaagaagauuccaacaaugauuuucccuacuucgauuucaucgaaucuugucuaaggcacaagucu

SEQ ID NO: 693 - RNA, 651 nt, Phyllotreta cruciferae
ugcuggacaacgagauuaaaauaaugaagagcgaagugaugcgaauaaaccacgaacugcaggcgcaaaacgagaagaucaaagagaauaccgagaaaauaaaagugaacaaaaccuugccuuacuugguuucgaacguaauagaacuguuggacguggauccccaagaagaggaagaggacggcgcaguagucgauuuggauucucaaagaaaagggaaaugcgcuguaguuaaaacguccacaagacagaccuauuuucuaccaguuauaggacuagucgaugaggagaaauugaaaccgggugaucuagugggagucaacaaagacucuuaucuaauuuuggaaacauuacccgcagaguacgaugccagagucaaggcuauggaagucgacgaaaggccuucugagcaguacuccgauaucggagguuuagauaaacaaauacaagaacuuaucgaagcuguuguacuaccuaugacgcauaaagacaaguucguuaauuugggaauucauccuccuaaagguguucuccuuuacggccccccggguaccggaaaaacccuccuagccagagccugcgccgcccaaacgaaaucaacuuuccucaaacuggccgguccucaguuaguccagauguucauaggagacg

SEQ ID NO: 694 - RNA, 530 nt, Phyllotreta cruciferae
ggaaaccgaggacauguuauauaaaaaacaagaguuuuuagaaaagaaaauagaggaauauacacuaguagccaaaaaaaaugcaucaaagaauaagagagucgcgcugcaggcgcucaaaaagaaaaaacgauuggaaaaaacucaauuacaaaucgauggcacacucacuacaaucgaaaugcaaagggaggcccucgaaggagccagcaccaacacagccgucuuagauucaaugaagaaugcagcugaagcucuccaaaaagcccacaaaaacuugaaugucgaugauguccacgacaucauggaugacauagcugaacagcaugacauugccaacgagauuacuacugcuauuagccagccgguaggcuucgcugaugauuuggacgaggaugaauuagaaagcgaacuagaaaagcucgaacaagaaggauuagaggaagauuugcugaaaguuccaggcccaacugaacuaccugcuguaccuacaggagcuauugccaagcccguuaaaccugcugcuaaaa

SEQ ID NO: 695 - RNA, 485 nt, Phyllotreta cruciferae
gcuauugagauuugcggaugauacuuauacggagaguuauauuaguacuauuggaguagauuuuaaaaucagaacaaucgacuuagauggaaaaacaauuaaauugcaaauuugggauaccgccggucaggaacgauuuagaacuauaacaucgaguuacuacaggggagcgcacggaaucaucgucguguacgauugcacagaccaggacucuuucaacaacgugaaacaaugguuggaggaaaucgaccguuacgcaugcgacaaugucaauaaauuacuuguaggaaauaaaagugaucuuacgacuaagaaaguugucgauuucaauacggcuaaggaauacgcggaucaguuggggguaccauuuuuggagacgucggcgaagaacgccacgaacguagagcaggccuuuaugacgauggcagccgaaauuaaaaaucgauuaggaccgccgaccgcggccgcagaucaaggaaacaaag

SEQ ID NO: 696 - RNA, 504 nt, Phyllotreta cruciferae
caguucaaauugguguugcucggcgagagcgccgucgguaaauccagucuggugcugagguucgucaaaggccaguuccacgaauaccaagagagcaccauaggggcugcguuccucacgcagaccaucugcuuggacgacaccaccguuaaauucgaaauaugggacaccgcgggacaggaaagguaucacaguuuagcuccgauguacuauagaggggcgcaggcagcuauagugguguacgauauaaccaaucaagauacguucggcagagcgaaaacgugggugaaggagcuccaaaggcaggccagucccaccauugugauagcccuggccggcaacaagcaggauuuggcuaacaagaggauggucgaguacgaggaagcgcaaacguacgccgacgagaacgguuuacucuucauggaaacaucggcgaaaacggcgaugaacguuaacgauauauuuuuagcaauagcuaagaaacugcccaaaaaugaacaaaca

SEQ ID NO: 697 - RNA, 406 nt, Phyllotreta cruciferae
augguagguuuagaugcugcugguaaaaccacaauuuuauauaaacuaaaauuaggagaaauuguaacaacuaucccaacuauugguuuuaaugucgagacuguagaauauaagaauaucagcuuuacaguaugggaugucgguggucaagauaaaauuaggccauuguggagacacuauuuucaaaauacgcagggccuaaucuuuguaguugacagcaacgacagggagcguaucaccgaggccaaagacgagcugaugcguaugcuggccgaagacgaacuccgggacgccguucuucugauauucgccaacaagcaggauuugccgaacgcuaugaacgccgccgaaaucaccgauaagcucggauuacauucguugcgcaaccguaacugguacauacagg

SEQ ID NO: 698 - RNA, 671 nt, Phyllotreta cruciferae
aagccaucgauuccuacaucaaagcugacgauccuucagcuuauauugaugucguugagacggcuucgaagaacaacagcugggaggaccuuguacgcuaccugcaaauggccaggaagaaggccagagaaagcuacaucgaauccgagcugaucuacucguacgccaagaccggccgauuggccgauuuggaagaauucaucagcggccccaaccacgcugauauccaaaaaaucggcgauagaugcuucgaugacaaaauguacgaugcggcuaaauugcuguacaacaacguuucgaauuucgcucgacuggccaucaccuuggugcaucugaaggaguuccaaggggccguggacagcgcccgcaaggccaacagcaccaggacguggaaggagguuugcuucgccugcguagacgccgaggaguuuagauuggcgcaaaugugcggcaugcauaucgucgugcaugccgaugaauugcaggauuugauaaacuauuaucaagacagagguuacuucgaggaguugauuggacuguuggaagcggcuuugggauuggagagggcccauauggggauguuuacugagcuggcuauauuguauucgaaauauaaaccggcuaggaugcgcgaacaucucgaauuguucuggucgaggguuaauauuccc

SEQ ID NO: 699 - RNA, 783 nt, Phyllotreta cruciferae
gaaagcuugggaaguagacacgugcagaggccauuauaacaaugugucuugcguuuuguuccauccaagacaggagcugauucugucuaauggugaagauagaaguauaaggguuugggauauggcuaaaaggacuugcuugcauacuuuuagaagggaacaugaacgauuuugggucaugacuagccacccgaaucuuaauuuauucgcugcuggucaugaugguggcaugguaauauucaaauuagaacgagagcgaccagcuuacacggugcacggcaaccuacuguauuacgucaaagagaaguauuuaagaaaacucgauuuuaccacuucgaaggaugucccuguuauucaaaucagaggcggcgguaaaauuccaguauacagaauguccuuuaauccagccgaaaacgcaguacuacuaucuacucgcacuucuaaucuggauaacagcacuuacgauuuguacaugauucccaaggaucaagaaagggaggaucacgugccugaagccgaaagcaagagaucuucgggucuuacagccuuguggguagcuagaaaucgauuugcuguacuggacaggacgcaccaguugaucauuaaaaaucuaaaaaacgagguaacuaaaaaaguucaaacgcccacuugcgaugaagucuuuuacgccggaacuggcaugcuuuuauugagagauuccgaacacguuaccuuguucgauguccaacaaaagaggacguuggcucaaguuaaaaucagcaaauguagauacgucguuugguc

SEQ ID NO: 700 - RNA, 399 nt, Phyllotreta cruciferae
ccgaguccacuucaagaauacgugcgagacggcgaacgccauaaggaagaugccccucaagagggccguggccuacuugaagaacguugucguccagaaagaguguauuccauuuaggagauucaacggaggcgucggccguugugcccaagccaagcaauucggcaccacgcagggcagguggcccaagaaguccgccgaauuucuauuacagcuccucaggaacgccgagagcaacgcagacuacaguggacucgaugucgauaggcuagucguagaacacauccaaguuaacagagcugcuuguuugagacgucguacguacagggcucacgguaggaucaaucccuacaugucgucgcccugccauaucgaacucugguuaaccgaaggggaauc

SEQ ID NO: 701 - RNA, 191 nt, Phyllotreta cruciferae
acgcaguacaagaaauccaaagaacgucacgcugcccaggguagaaggcguuacgacagaaaacagcaagguuucgguggucaaacuaaacccaucuucaggaagaaggcaaaaaccaccaagaaaaucguguugaggauggagugugcggacugcaaguacaggaagcaguucccuuugaagagaugcaa

SEQ ID NO: 702 - protein, 777 aa, Phyllotreta armoraciae
MTTYEEYIQQNEDRDGIRFTWNVWPSSRIEATRLVVPLACLYQPIKERVDLPTIQYDPVLCTRNNCRAILNPLCQVDYRAKLWVCNFCFQRNPFPQQYAAISEQHQPAELMPMFSTIEYTINRVHCLPPIFLYVVDTCMDEEELGSLKDSLQMSLSLLPQNALIGLITFGKMVQVHELGTEGVSKSYVFRGTKDLTAKQVQEMLGIGKVAMAQQQPQPQQPGQPMRPGQPQSAPVPPGSRFLQPISKCDMNLTDLIGEQQKDPWPVHQGKRPLRCTGVALSIAIGLLECTYANTGARVMLFVGGSCSQGPGQVLNDDLKQPIRSHHDIQKDNAKYMKKAIKHYDTLAMRAATNGHCIDIYSCALDQTGLMEMKQCANSTGGHMVMGDSFNSSLFKQTFQRVFTRDQKNDLKMAFNGTLEVKCSRELKVQGGIGSCVSLNVKSQLVSDTEIGMGNTVQWKMCTLTPSTTMALFFEVVNQHAAPIPQGGRGCIQFITQYQHSNGQRRIRVTTVARNWADATTNIHHISAGFDQEAAAVIMARMAVYRAESDESPDVLRWVDRMLIRLCQKFGEYNKDDAGSFRLGQNFSLYPQFMYHLRRSQFLQVFNNSPDETSFYRHMLMREDLTQSLIMIQPILYSYSFNGPPEPVLLDTSSIQPDRILLMDTFFQILIFHGETIAQWRNLKYQDMPEYENFRQLLQAPVDDAQEILQTRFPMPRYIDTEQGGSQARFLLSKVNPSQTHNNMYSYGGDAGAPVLTDDVSLQVFMDHLKKLAVSSTA

SEQ ID NO: 703 - protein, 906 aa, Phyllotreta armoraciae
MPLRLDIKRKLTARSDRVKCVDLHPTEPWMLCSLYSGNINVWNHENQQLVKTFEVCDLPVRAAKFVPRKNWIVSGSDDMQIRVFNYNTLDRVHAFEAHSDYVRSIVVHPTQPYILTSSDDMLIKLWNWEKAWACQQVFEGHVHYIMQIAINPKDNNTFASASLDRTIKVWQLGASTANFTLEGHEKGVNCVDYYHGGDKPYLISGADDRLVKIWDYQNKTCVQTLEGHGQNVTAVCFHPELPIALTGSEDGTVRVWHANTHRLESSLNYGFERVWTIFCLKGSNNVALGYDEGSILVKVGREEPAVSMDASGGKIIWARHSELQQANLKALPEGAEIRDGERLPVSIKDMGACDIYPQTIQHNPNGRFVVVCGDGEYIIYTAMALRNKAFGSAQEFVWAQDSSEYAIRESGSTIRIFKNFKEKKNFKSDFGAEGIYGGYLLGVKSVSGLAFYDWETLDLVRRIEIQPRSIYWSDSGKLVCLATEDSYFILSYDVDEVQKARDNNQVADDGVESAFNVLGEVNESVRTGLWVGDCFIYTNAVNRINYFVGGELVTIAHLDGPLYVLGYVPKDDRLYLVDKELRVVSYQLLLSVLEYQTAVMRRDFSTADRVLPSIPKEHRTRVAHFLEKQGFKQQALAVSTDPEHRFELAVALEDLNTAKMLAQEANNPQKWSQLADLAASTNNLVLAKECMQKAQDYGGLLLLATSSGDDEVVRTLGEATEAEGKHNLAFLSHLLVGDLNKCLDILISTGRLPEAAFFARSYLPDKISEVVELWRAQLSVTNQKAGQSLADPKDYDNLFPGLQEAIAAQKYLEQNSPGIIPAAVAATVTPNQERNVIAEVEAKVKGGLGVLPNTSLPSVMSPSEQMKKLSITQDDDDLDLDLDGVNIDENIDTTDINIDEDDLLSD

SEQ ID NO: 704 - protein, 956 aa, Phyllotreta armoraciae
MTAVEQPCYTLINLPTDSEPYNEMQLKMDLEKGEVKVKIRALERIIHMILAGERLPNGFLMTIIRNVLPLQDHLAKKLLLIFWEIVPKTTADGKLLQEMILVCDAYRKDLQHPNEFLRGSTLRFLCKLKEPELLEPLMPSIRICLEHRHSYVRRNAVLAIFTIYKNFEFLIPDAPELISTYLDGEQDMSCKRNAFLMLLHADQDRALTYLSNCLDQVASFGDILQLVIVELIYKVCHSNPTERSRFIRCIYNLLNSSSPAVRYEAAGTLITLSSAPTAIKAAASCYIELIIKESDNNVKLIVLDRLIALKEHPSHERVLQDLVMDILRVLSAPDLEVRKKTLNLALELVSSRNVEEMVFVLKKEVSKTVDSEHEDTGKYRQLLVRTLHSCCIKFPDIAATVIPVLMEFLSDSNELAATDVLLFLREAIQKFDNLEPLIIEKLLETFKDIKSVKVHRAALWILGEYATSTGDIEAVIKEIIQTLGECPLLETEQKIISGNADESAPVHAPAGATTLVTSDGTYATQSAFNVSSKSTKEKRPPLRQYLMDGDFFIAASLASTLTKLALRYGENVSASDRNKFDAEVMLIMAGILHLGKSGLPVKPITNDDNDHILFCLRVLSDRTEPVIQVFSSLCRNALNDMLLAKETEEVTDQKSREKSRAAVQTDDAITFVQLESDRSGELGENVFETSLSQALMGGKTGQSDSTIGSSKLNKIAQLTGFSDPVYSEAYVHVNQYDIVLDVLVVNQTSDTLQNCTLELATLGDLKLVEKPQPVVLAPKDFCNIKANVKVASTENGIIFGNIVYDVTGAASDRNVVVLNDIHIDIMDYIVPASCTDSEFMRMWAEFEWENKVTVNTPLTDLNEYLEHLLKSTNMKCLTPEKALGGQCGFMAANMYAKSIFGEDALANLSIEKPFNKPDAPVAGHIRIRAKSQGMALSLGDKINMTQKGTQNKVVAA

SEQ ID NO: 705 - protein, 272 aa, Phyllotreta armoraciae
EGIPPDQQRLIFAGKQLEDGRTLSDYNIQKESTLHLVLRLRGGMQIFVKTLTGKTITLEVEPSDTIENVKAKIQDKEGIPPDQQRLIFAGKQLEDGRTLSDYNIQKESTLHLVLRLRGGMQIFVKTLTGKTITLEVEPSDTIENVKAKIQDKEGIPPDQQRLIFAGKQLEDGRTLSDYNIQKESTLHLVLRLRGGMQIFVKTLTGKTITLEVEPSDTIENVKAKIQDKEGIPPDQQRLIFAGKQLEDGRTLSDYNIQKESTLHLVLRLRGGQ

SEQ ID NO: 706 - protein, 200 aa, Phyllotreta armoraciae
MECLLGIKFDDFVLVAADMTAAQSIIVMKTDENKLFKLSNKLVMAVSGESGDTTQFAEYIAKNIQLYKMRNTYELSPSEAASFTRRNLADALRSRSPYHVNLLLAGYDDKEGPQLYYMDYLASTIKVNYAAHGYGGFFSLSIMDRNYIKSLSREEGYELLKKCVKEVQKRLIINLPNFKVQCVGKDGITDLPDITPKDLA

SEQ ID NO: 707 - protein, 185 aa, Phyllotreta armoraciae
MADDEEKKRKQAEIERKRAEVRARMEEASKAKKAKKGFMTPERKKKLRLLLRKKAAEELKKEQERKAAERRRIIEERCGKPKLIDDANEEQLKSISKMYHERICKLEDQKFDLEYLVKKKDMEIAELNSQVNDLRGKFVKPTLKKVSKYENKFAKLQKKAAEFNFRNQLKVVKKKEFTLEEEDKE

SEQ ID NO: 708 - protein, 237 aa, Phyllotreta armoraciae
DLGNGVMRFSRTKMFHKKALYKFIGKKVKATKKPQKPHVIEKPINGEKNGGKRFVLVKKRRAYYPTQDKIKPRPAKKSFCQHKRSLRTTITPGTVLILLAGSHKGKRVVFLKQLYSGLLLVTGPFSINACPLRRISQRYVIATSTKIDVSGIKVPDTFNDDYFARKRVKRAKKEEGDIFQTKKEVYKVSEERKKDQKEIDAQVIAAIKKHPDHKVLQAYLSSMWGLRSSQYPHRLNF

SEQ ID NO: 709 - protein, 217 aa, Phyllotreta armoraciae
MPQDGSNDWRDAAHSTGTSIMASEFDGGVVIGADSRTTTGAYIANRVSDKLTRVTDHIYCCRSGSAADTEAIADIVGYHLNFHGMELGEEPSVEVGAAIFKELCYNYRDSLMAGILVAGWDKKKGGQIYSIPIGGMCVRQEVSIGGSGSSYVYGYMDANYKPKMSKEDCVKFVTNTLALAMSRDGSSGGVIRLGIITEEGIERRVVLGNELPKFYEG

SEQ ID NO: 710 - protein, 248 aa, Phyllotreta armoraciae
MAGKGDGKGEASILKLENQIAVIKYVILFANVLQWALGGAIFALCLWMRFEEGIQEWLQKLDSEQFYNGVYVLIVASLIVMIVSFLGCISALQENTVTLLAYIGTQVLSFIFGLAGSAVLLDNSARDSHFQPRIRESMRRLIMNAHHEPSRVTLAMIQENIGCCGADGAEDYLALQQPLPSQCRDTVTGNPYFHGCVDELTWFFEEKCAWIAALAMCICFFNVFSIVLSTVLIQALKKEEEQSDTYRK

SEQ ID NO: 711 - protein, 1005 aa, Phyllotreta armoraciae
MNITSAAGIISLLEEPRPELKVFALRKLDSIVDEFWPEISEAIEKIEILHEDKVFQQHQLAALVASKVYYHLGAFEDSLTYALGAGDLFDVNARTEYVETTLAKCIDFYTQQRIALAEGSTDAKPIDSRLEAIVNRMFQRCLDDGQYRQAMGLALETRRMDIFELSITQADDVISMLTYAFQVAMSLIQNRAFRNTVLRSLVGLYRGLTTPDYVNMCQCLIFLDDPLSVAEILDKLVSGKEESELMAYQIAFDLYESATQQFLERVLVALRATAPIPSLLEEKVKSKSAEQSSSTSAEAPKDPVSSETKSEAKEEKSIEGLTESEKEHQKRIEKLHTILSGEVSIELHLQFLIRSNHADLLILKQTKETVRVSICHTATVIANAFMHSGTTSDQFLRDNLEWLARATNWAKLTATASLGVIHRGHEQEALTLMQSYLPKEVGPSSGYSEGGGLYALGLIHANHGANIIDYLLGQLKDAQNEMVRHGGCLGLGLAAMGTHRQDVYEQLKFNLYQDDANTGEAAGIAMGMVMLGSSNPTTIMDMVAYAQESQHEKILRGLAVGISFTMYGRLEEADTLIQQLTSDKDPILRRSGMYTLAMAYCGTGHNQAIRKLLHVAVSDVNDDVRRAAVTALGFLLFRTPEQCPSVVSLLAESYNPHVRYGAAMALGIACAGTGLREAIALLEPMVMFDPVNFVRQGALIASAMILIQQTEQTCPKVSFFRQTYSQVISNKHEDVMAKFGAILAQGIIDAGGRNVTLSLQSRTGHTNMLAVVGTLVFTQYWYWFPLSHCLALAFTPTCVVALNTQLKMPKLEFKSNAKPSLYAYPAPMEEKKREEREKVTTAVLSIAARQRRRDHERKHRDEKMDVDEDKDDKKTEKEEKEKKSEDKKEEKKSDDKKTDDKKATSSSDDKKDKKDEKEEKKKEPEPNFEILQNPARTMRQQLKVITLNDNSQYVAMKDVSIGGLIMVRNLKPGEEELVEPVAAFGPKGDDEKEPEPPEPFEWTED

SEQ ID NO: 712 - protein, 128 aa, Phyllotreta armoraciae; identical to SEQ ID NO: 389

SEQ ID NO: 713 - protein, 879 aa, Phyllotreta armoraciae
MSSCKREKKEEEDGVGNIFQNIEKTTVLQEARVFNETSVNPRKCTLILTKLLYLLNQGEALNVKEATDVFFAMTKLFQSKDVILRRMVYLGIKELSSTADDVIIVTSSLTKDMTGKEDIYRAAAIRALCSITDATMLQAIERYMKQAIVDRNSAVSSAALVSSLHMTKMAPEVVKRWVNEAQEAINSDNVMVQYHALGLLYHIRKTDRLAVTKLIAKLTRTTLKSPYAVCMLIRIIAKLLEEEDSGNDFPYFDFIESCLRHKSEMVVYEAAHAIVNLKGTTSKELAPAVSVLQLFCGSPKATLRFAAVRTLNQVAISHPAAVTACNLDLENLITDSNRSIATLAITTLLKTGAESSVDRLMKQIASFVSEISDEFKVVVVQAIRALALKFPRKHNTLMNFLSAMLRDEGGLEYKASIADTIITIIEDNPEAKESGLAHLCEFIEDCEHVSLAVRILHLLGREGPKTKQPSRYIRFIYNRVILECPSIRAAAVSAMAQFGASCPDLLENIQVLLARCQMDSDDEVRDRATYYSSILNKNDKNLYNNFILDTLQVSIPSLERSLKEYTQNPTNQPFDIKSVPLQVGPSPDEREKKHKSEGMLTSQGPVRPPPVSREENFAEKLSAIPGIQQLGPIFKSSEVVELTESETEYFVRCIKHCFAHHVVLQFDCLNTLPDQLLEDVRVELEPSEGFELLSVVPCKQLHYNETNHTYAILKFPDDDLPSCVGTFGAVLKFIVKDCDPTTGIPDSDEGYNDEYILEDLEITLGDQIQRVSKVNWGAAWETAAESSVEKEDTYSLSSMNTLDEAVKNIVQFLGLQPAERTDKVPEGKSTHTLLLSGVFRGGIDILVRAKLALADGVTMQLTVRSPDDSIAELITSSVG

SEQ ID NO: 714 - protein, 427 aa, Phyllotreta armoraciae
MSTLEDKSIWEDGEEALGEEILRMSTDVIIGHTRLLDNEIKIMKSEVMRINHELQAQNEKIKENTEKIKVNKTLPYLVSNVIELLDVDPQEEEEDGAVVDLDSQRKGKCAVVKTSTRQTYFLPVIGLVDEEKLKPGDLVGVNKDSYLILETLPAEYDARVKAMEVDERPSEQYSDIGGLDKQIQELIEAVVLPMTHKDKFVNLGIHPPKGVLLYGPPGTGKTLLARACAAQTKSTFLKLAGPQLVQMFIGDGAKLVRDAFALAKEKAPAIIFIDELDAIGTKRFDSEKAGDREVQRTMLELLNQLDGFSSTSDIKVIAATNRVDILDPALLRSGRLDRKIEFPHPNEEARARIMQIHSRKMTVNPDVNFEELARSTDDFNGAQCKAVCVEAGMIALRRNATAVTHEDYMDAIMEVQAKKKANLNYYA

SEQ ID NO: 715 - protein, 219 aa, Phyllotreta armoraciae
MSFFTKIFGGKEKDTGPTPGEAIQKLRETEDMLYKKQEFLEKKIEEYTLVAKKNASKNKRVALQALKKKKRLEKTQLQIDGTLTTIEMQREALEGASTNTAVLDSMKNAAEALQKAHKNLNVDDVHDIMDDIAEQHDIANEITTAISQPVGFNDDLDEDELESELEKLEQEGLEEDLLKVPGPTELPAVPTGAIAKPVKPAAKKVEDDDDMKELEAWAS

SEQ ID NO: 716 - protein, 202 aa, Phyllotreta armoraciae
MNPEYDYLFKLLLIGDSGVGKSCLLLRFADDTYTESYISTIGVDFKIRTIDLDGKTIKLQIWDTAGQERFRTITSSYYRGAHGIIVVYDCTDQDSFNNVKQWLEEIDRYACDNVNKLLVGNKSDLTTKKVVDFNTAKEYADQLGVPFLETSAKNATNVEQAFMTMAAEIKNRLGPPTAAADQGNKVRFDQSRPVESTKSGCC

SEQ ID NO: 717 - protein, 216 aa, Phyllotreta armoraciae
MATNRTVTAQRPNGATQGKICQFKLVLLGESAVGKSSLVLRFVKGQFHEYQESTIGAAFLTQTICLDDTTVKFEIWDTAGQERYHSLAPMYYRGAQAAIVVYDITNQDTFGRAKTWVKELQRQASPTIVIALAGNKQDLANKRMVEYEEAQTYADENGLLFMETSAKTAMNVNDIFLAIAKKLPKNEQTSGQGGSAQGRRLAEGDAGAKAPGNCCK

SEQ ID NO: 718 - protein, 182 aa, Phyllotreta armoraciae; identical to SEQ ID NO: 395

SEQ ID NO: 719 - protein, 1534 aa, Phyllotreta armoraciae
RHSSLNGCQIINYRTDPKQNWLLLVGISAQQSRVVGAMQLYSVERKCSQPIEGHAASFATFKMEGNPEPSTLFCFAVRTLQGGKLHIIEVGQNPAGNQPFPKKSVDVFFPPEAQNDFPVAMQVSTKYDVIYLITKYGYIHMYDIESGTCIYMNRISSDTIFVTAPHESTGGIIGVNRRGQVLSVSVDEESIIRYINTVLHNADLALRLATRNNLAGAEDLFVSKFQMLFQNGQYAEAAKVAANAPKGILRTPATIQMFQQVPTQPGQNSPLLQYFGILLDQGQLNRYESLELCKPVLLQGRKQLLEKWLKEEKLECSEELGDLVKQADPTLALSVYLRANVPAKVIQSFAETGQFQKIVLYAKKVSYTPDYVFLLRQVMRTNPDQGAAFAGMLVADEEPLADINQIVDIFMEQNMVQQCTAFLLDALKNNRPTEGHLQTRLLEMNLMSAPQVADAILGNNMFTHYDRAHVAQLCEKAGLLQRALEHYTDLYDIKRAVVHTHLLPADWLVNFFGTLSVEDSLECLKAMLTANIRQNLQICVQIATKYHEQLTTKALIDLFESFKSYEGLFYFLGSIVNFSQDQEVHFKYIQAACKTGQIKEVERICRESNCYNAERVKNFLKEAKLTDQLPLIIVCDRFDFVHDLVLYLYRNSLQKYIEIYVQKVNPSRLPVVVGGLLDVDCSEDIIKNLILVVRGQFSTDELVEEVEKRNRLKLLLPWLESRVHEGCVEPATHNALAKIYIDSNNNAERFLKENQWYDSRVVGRYCEKRDPHLACVAYERGQCDRELIAVCNENSLFKSEARYLVRRRDGELWAEVLQEANPYRRQLIDQVVQTALSETQDPEDISVTVKAFMTADLPNELIELLEKIVLDNSVFSEHRNLQNLLILTAIKADATRVMDYINRLDNYDAPDIANIAINNHLYEEAFAIFKKFDVNTSAIQVLIEQVNNLDRAYEFAERCNEPAVWSQLAKAQLNQGLVKEAIDSYIKADDPSAYIDVVETASKNNSWEDLVRYLQMARKKARESYIESELIYSYAKTGRLADLEEFISGPNHADIQKIGDRCFDDKMYDAAKLLYNNVSNFARLAITLVHLKEFQGAVDSARKANSTRTWKEVCFACVDAEEFRLAQMCGMHIVVHADELQDLINYYQDRGYFEELIGLLEAALGLERAHMGMFTELAILYSKYKPARMREHLELFWSRVNIPKVLRAAEQAHLWAELVFLFDKYEEYDNAVLAMMAHPTEAWREGHFKDIITKVANIELYYKAIQFYLDFKPLLLNDLLLVLAPRMDHTRAVAFFAKTSHLQLVKSYLRSVQNLNNKAINEALNSLLIEEEDFQGLRTSIDAFDNFDNIGLAQRLEKHELTEFRRIAAYLYKGNNRWKQSVELCKKDRLFRDAMEYTSESRNQELAEELLAWFLDRKAYDCFSACLYHCYDLLRPDVILELAWKHNIMDFAMPFLIQVTRELTSKVEKLEQSDAQRQSEAAEETNKPIMMPEPQLMLTAGPGMGIPQQPYMPQQTYAQVGYAPQMAYQGYPGM

SEQ ID NO: 720 - protein, 1223 aa, Phyllotreta armoraciae
MLTKFETKSARVKGLSFHPKRPWILASLHNGCIQLWDYRMCTLLEKFDEHDGPVRGICFHNQQPLFVSGGDDYKIKVWNYKQKRCIFTLLGHLDYIRTTMFHHEYPWIVSASDDQTIRIWNWQSRTCICVLTGHNHYVMCATFHPSEDLLLSASLDSTVRVWDISGLRKKNVSPGPSGLEDHLKNPGATELFGQADAVVKHVLEGHDRGVNWASFHPFLPLIASGADDRQIKLWRMNDSKAWEVDTCRGHYNNVSCVLFHPRQELILSNGEDRSIRVWDMSKRTCLHTFRREHERFWVMTSHPNLNLFAAGHDGGMVIFKLERERPAYTVHGNLLYYVKEKYLRKLDFTTSKDVPVIQIRGGGKIPVYRMSFNPAENAVLLSTRTSNLDNSTYDLYMIPKDQERDDHVPEAESKRSSGLTALWVARNRFAVLDRTHQLIIKNLKNEVTKKVQTPTCDEVFYAGTGMLLLRDSEHVTLFDVQQKRTLAQVKISKCRYVVWSSDMSHLALLSKHNVTICNRKLDVLCSLHENTRVKSGAWDDSGVFIYTTSNHIKYTLKNGDHGIIRTLDLPIYITRVKGSQVFCLDRECKPRLLVIDPTEYKFKLALINHKYEEVLYMVRNSRLVGQSIISYLQQKGYPEVALHFVKDDKTRFALALECGNIEIALEAAKALNDKNCWDQLAQAALWQGNHQIVEMCYQRTKSFEKLSFLYLITGNLEKLRKMMKIAEIRKARSSQYHAALLLGDLEERVKLLKASNQLSLAYLTAATHGMREEAEQLKEQIGDDKKLPDVDPKAKFLKPPPPIQQAESNWPLLTVSRSFFENTAAAATASANMKSLMAEPVTDVGMEDAQGWGDDDELELDPDEKKAEVAAAGGGDGEGGWDVEDEGLEIPDLGPTATVEAEGNFVHLPTQGPSPLIVWTKNSQLVADHVAAGSFESAARLLHDQLGVVNFRPFESLFLNLYSTSKTVSSWQQNVPPSFSYPLRNWKEGNVKNQLPASGVKLNDLVAKLQICYQLTTGGKFTEAIEKLQTLLLSVTLLVVDNKQEISEAQQLLRIASEYICGLQMETLRKTLPKTSAEEQKRQCEMAAYFTHCKLQPIHQILTLRTALNMFFKLKNYKTAASFAKRLLELGPRPEVAQQARKILQACDSNLTDDFQLHYDEHNPFNLCGHSYTPIYRGKAEEKCPLCGTSYLPKYKGVLCNICKVAEVGKDTIGLRISTHQFR

SEQ ID NO: 721 - protein, 183 aa, Phyllotreta armoraciae
MGRYAREPDNAAKSCKARGSNLRVHFKNTCETANAIRKMPLKRAVAYLKNVVIQKECIPFRRFNGGVGRCAQAKQFGTTQGRWPKKSAEFLLQLLRNAESNADYSGLDVDRLVVEHIQVNRAACLRRRTYRAHGRINPYMSSPCHIELWLTEGESSPEAPKKSNKKKATEKKRPKSSVAAVAH

SEQ ID NO: 722 - protein, 104 aa, Phyllotreta armoraciae; identical to SEQ ID NO: 420

SEQ ID NO: 723 - protein, 779 aa, Phyllotreta cruciferae
MTTYEEYIQQNEDRDGIRFTWNVWPSSRIEATRLVVPLACLYQPIKERVDLPPIQYDPVLCTRNNCRAILNPLCQVDYRSKLWVCNFCFQRNPFPQQYAAISEQHQPAELMPMFSTIEYTINRVQCLPPIFLYVVDTCMDEEELGSLKDSLQMSLSLLPQNALIGLITFGKMVQVHELGTEGVSKSYVFRGTKDLTAKQVQEMLGIGKVSMAPHNPQQQPQQPGQPMRPGQPQSAPVPPGSRFLQPISKCDMNLTDLIGEQQKDPWPVHQGKRPLRCTGVALSIAIGLLECTYANTGARVMLFVGGSCSQGPGQVLNDDLKQPIRSHHDIQKDNAKYMKKAIKHYDTLAMRAATNGHCIDIYSCALDQTGLMEMKQCANSTGGHMVMGDSFNSSLFKQTFQRVFTRDQKNDLKMAFNGTLEVKCSRELKVQGGIGSCVSLNVKSQLVSDTEIGMGNTVQWKMCTLTPSTTMALFFEVVNQHSAPIPQGGRGCIQFITQYQHSSGQRRIRVTTVARNWADATTNIHHISAGFDQEAAAVIMARMAVYRAESDESPDVLRWVDRMLIRLCQKFGEYNKDDAGSFRLGQNFSLYPQFMYHLRRSQFLQVFNNSPDETSFYRHMLMREDLTQSLIMIQPILYSYSFNGPPEPVLLDTSSIQPDRILLMDTFFQILIFHGETIAQWRNLKYQDMPEYENFRQLLQAPIDDAQEILQTRFPMPRYIDTEQGGSQARFLLSKVNPSQTHNNMYSYGGDAGAPVLTDDVSLQVFMDHLKKLAVSSTA

SEQ ID NO: 724 - protein, 905 aa, Phyllotreta cruciferae
MPLRLDIKRKLTARSDRVKCVDLHPTEPWMLCSLYSGNINVWNHENQQLVKTFEVCDLPVRAAKFVPRKNWIVSGSDDMQIRVFNYNTLDRVHAFEAHSDYVRSIVVHPTQPYILTSSDDMLIKLWNWEKAWACQQVFEGHVHYIMQISINPKDNNTFASASLDRTIKVWQLGASTANFTLEGHEKGVNCVDYYHGGDKPYLISGADDRLVKIWDYQNKTCVQTLEGHGQNVTAVCFHPELPIALTGSEDGTVRVWHANTHRLESSLNYGFERVWTIFCLKGSNNVALGYDEGSILVKVGREEPAVSMDASGGKIIWARHSELQQANLKALPEGAEIRDGERLPVSIKDMGACDIYPQTIQHNPNGRFVVVCGDGEYIIYTAMALRNKAFGSAQEFVWAQDSSEYAIRESGSTIRIFKNFKEKKNFKSDFGAEGIYGGYLLGVKSVSGLAFYDWETLDLVRRIEIQPRSIYWSDSGKLVCLATEDSYFILSYDAEEVQRAKDNNQVADDGVESAFNLLGEVNESVRTGLWVGDCFIYTNAVNRINYFVGGELVTIAHLDGPLYVLGYVPKDDRLYLVDKELRVVSYQLLLSVLEYQTAVMRRDFSTADRVLPSIPKEHRTRVAHFLEKQGFKQQALAVSTDPEHRFELAVALEDLNTAKMLAQEANNPQKWSQLADLAASTNNLVLAKECMQKAQDYGGLLLLATSSGDDEVVRTLGEATEAEGKHNLAFLSHLLIGDLNKCLDILISTGRLPEAAFFARSYLPDKISEVVELWRAQLSVTNQKAGQSLADPKDYDNLFPGLQEAIVAQKYLEENHSGFIPAAMAATVTPNQERNVIAEVEAKVKGADGVLPSTSQPSVKAPSEQMKKLSITQDEDDLDLDLDGVNIDENIDTTDINIDDDLLSD

SEQ ID NO: 725 - protein, 941 aa, Phyllotreta cruciferae
MTAVEQPCYTLINLPTDSEPYNEMQLKMDLEKGEVKVKIRALERIIHMILAGERLPNGFLMTIIRNVLPLQDHLAKKLLLIFWEIVPKTTPDGKLLQEMILVCDAYRKDLQHPNEFLRGSTLRFLCKLKEPELLEPLMPSIRICLEHRHSYVRRNAVLAIFTIYKNFEFLIPDAPELISTYLDGEQDMSCKRNAFLMLLHADQDRALTYLSNCLDQVASFGDILQLVIVELIYKVCHSNPTERSRFIRCIYNLLNSSSPAVRYEAAGTLITLSSAPTAIKAAASCYIELIIKESDNNVKLIVLDRLIALKEHPSHERVLQDLVMDILRVLSAPDLEVRKKTLNLALELVSSRNVEEMVFVLKKEVSKTVDSEHEDTGKYRQLLVRTLHSCCIKFPDIAATVIPVLMEFLSDSNELAATDVLLFLREAIQKFDNLEPLIIEKLLETFKDIKSVKVHRAALWILGEYATSTADIEAVIKEIVQTLGECPLLESEQKIISGSTDESAPAHAPAGATTLVTSDGTYATQSAFNVASKSTKEKRPPLRQYLMDGDFFIAASLASTLTKLALRYGENVSASDRNKFDAEVMLIMAGILHLGKSGLPVKQITNDDNDHILFCLRVLSDRTEPVVQVFSSLCRNALNDMLLAKETEEATDQKSREKSRAAVQTDDAITFVQLESDRSGELGENVFETSLSQALMGGKTGQSDSTIGSSKLNKIAQLTGFSDPVYSEAYVHVNQYDIVLDVLVVNQTSDTLQNCTLELATLGDLKLVEKPQPVVLAPKDFCNIKANVKVASTENGIIFGNIVYDVTGAASDRNVVVLNDIHIDIMDYIVPASCTDSEFMRMWAEFEWENKVTVNTPLTDLNEYLEHLLKSTNMKCLTSEKALGGQCGFMAANMYAKSIFGEDALANLSIEKPFNKPDAPVAGHIRIRAKSQGMALSLGDK

SEQ ID NO: 726 - protein, 506 aa, Phyllotreta cruciferae
  misc_feature (210)..(241): Xaa can be any naturally occurring amino acid
MQIFVKTLTGKTITLEVEPSDTIENVKAKIQDKEGIPPDQQRLIFAGKQLEDGRTLSDYNIQKESTLHLVLRLRGGMQIFVKTLTGKTITLEVEPSDTIENVKAKIQDKEGIPPDQQRLIFAGKQLEDGRTLSDYNIQKESTLHLVLRLRGGMQIFVKTLTGKTITLEVEPSDTIENVKAKIQDKEGIPPDQQRLIFAGKQLEDGRTLSXXXXXXXXXXXXXXXXXXXXXXXXXXXXXXXXQRLIFAGKQLEDGRTLSDYNIQKESTLHLVLRLRGGMQIFVKTLTGKTITLEVEPSDTIENVKAKIQDKEGIPPDQQRLIFAGKQLEDGRTLSDYNIQKESTLHLVLRLRGGMQIFVKTLTGKTITLEVEPSDTIENVKAKIQDKEGIPPDQQRLIFAGKQLEDGRTLSDYNIQKESTLHLVLRLRGGMQIFVKTLTGKTITLEVEPSDTIENVKAKIQDKEGIPPDQQRLIFAGKQLEDGRTLSDYNIQKESTLHLVLRLRGGQ

SEQ ID NO: 727 - protein, 200 aa, Phyllotreta cruciferae
MECLLGIKFDDFVLVAADMTAAQSIIVMKTDENKLFKLSNKLVMAVSGESGDTTQFAEYIAKNIQLYKMRNTYELSPSEAASFTRRNLADALRSRSPYHVNLLLAGYDEKEGPQLYYMDYLASTIKVNYAAHGYGGFFSLSIMDRNYVKSLSREEGYELLKKCVKEVQKRLIINLPNFKVQCVGRDGITDLPDITAKDLA

SEQ ID NO: 728 - protein, 161 aa, Phyllotreta cruciferae
MEEASKAKKAKKGFMTPERKKKLRLLLRKKAAEELKKEQERKAAERRRIIEERCGKPKLIDDANEEQLKSISKAYHERICKLEDQKFDLEYLVKKKDMEIAELNSQVNDLRGKFVKPTLKKVSKYENKFAKLQKKAAEFNFRNQLKVVKKKEFTLEEEDKE

SEQ ID NO: 729 - protein, 264 aa, Phyllotreta cruciferae
MVEKKKTETAPAEAPKKVHKPGKPRNYDLGNGVMRFSRTKMFHKKALYKFIGKKVKATKKPQKPHVIEKPINGEKNGGKRFVLVKKRRAYYPTQDKIKPRPAKKSFCQHKRSLRTTITPGTVLILLAGSHKGKRVVFLKQLYSGLLLVTGPFSINACPLRRISQRYVIATSTKIDVSGIKVPDNFDDDYFARKRVKRAKKEEGDIFQTKKEVYKVSEERKKDQKEVDSQVMAAIKKHPDRKVLQSYLSSMWGLRSSQYPHRMNF

SEQ ID NO: 730 - protein, 225 aa, Phyllotreta cruciferae
MPPVMTDFMPQDGSNDWRDAAHSTGTSIMASEFDGGVVIGADSRTTTGAYIANRVSDKLTRVTDHIYCCRSGSAADTEAIADIVGYHLNFHGMELGEEPSVEVGAAIFKELCYNYRDSLMAGILVAGWDKKKGGQIYSIPIGGMCVRQEVSIGGSGSSYVYGYMDANYKPKMSKEDCVKFVTNTLALAMSRDGSSGGVIRLGIITEEGIERRVVLGNELPKFYEG

SEQ ID NO: 731 - protein, 248 aa, Phyllotreta cruciferae
MAGKGDGKGEASILKLENQIAVIKYVILFANVLQWALGGAIFALCLWLRFEEGIQEWLQKLDSEQFYNGVYVLIVASLIVMIVSFLGCISALQENTVTLLAYIGTQVLSFIFGLAGSAVLLDNSARDSHFQPRIRESMRRLIMNAHHEPSRVTLAMIQENIGCCGADGAEDYLALQQPLPSQCRDTVTGNPYFHGCVDELTWFFEEKCAWIAALAMCICFFNVFNIVLSTVLIQALKKEEEQADSYRN

SEQ ID NO: 732 - protein, 1006 aa, Phyllotreta cruciferae
MNITSAAGIISLLEEPRPELKVFALRKLDSIVDEFWPEISEAIEKIEILHEDKVFQQHQLAALVASKVYYHLGAFEDSLTYALGAGDLFDVNARTEYVETTLAKCIDFYTQQRIALAEGATDAKPIDSRLEAIVNRMFQRCLDDGQNRQAMGLALETRRMDIFELSITQAEDIISMLTYAFQVAMSLIQNRAFRNTVLRSLVGLYRGLTTPDYVNMCQCLIFLDDALPVAEILDKLVSGKEESELMAYQIAFDLYESATQQFLERVLVALRATAPIPSLLEEKVKSKTTEQSSSTSAEASKDPVSSETKSEVKKEEKSIESLTESEKEHQKRIEKLHTILSGEVSIELHLQFLIRSNHADLLILKQTKETVRVSICHTATVIANAFMHSGTTSDQFLRDNLEWLARATNWAKLTATASLGVIHRGHEQEALTLMQSYLPKEVGPSSGYSEGGGLYALGLIHANHGANIIDYLLGQLKDAQNEMVRHGGCLGLGLAAMGTHRQDVYEQLKFNLYQDDANTGEAAGIAMGMVMLGSSNSTTIMDMVAYAQESQHEKILRGLAVGISFTMYGRLEEADTLIQQLTSDKDPILRRSGMYTLAMAYCGTGHNQAIRKLLHVAVSDVNDDVRRAAVTALGFLLFRTPEQCPSVVSLLAESYNPHVRYGAAMALGIACAGTGLREAIALLEPMVMFDPVNFVRQGALIASAMILIQQTEQTCPKVSFFRQTYSQVISNKHEDVMAKFGAILAQGIIDAGGRNVTLSLQSRTGHTNMLAVVGTLVFTQYWYWFPLSHCLALAFTPTCVIALNTQLKMPKLEFKSNAKPSLYAYPAPMEEKKREEREKVTTAVLSIAARQRRRDHERKHRDEKMDVDEDKDDKKTEKEEKEKKTEDKKEEKKSDDKKTDDKKAASSSDDKKDKKDDKEEKKKEPEPIFEILQNPARTMRQQLKVITLNDNSQYVAMKDVSIGGIIMVRNLKPGEEELVEPVAAFGPKGDDEKEPEPPEPFEWTED

SEQ ID NO: 733 - protein, 128 aa, Phyllotreta cruciferae
MQIFVKTLTGKTITLEVEPSDTIENVKAKIQDKEGIPPDQQRLIFAGKQLEDGRTLSDYNIQKESTLHLVLRFRGGIIEPSLRLLAQKYNCDKMSCRKCYARLHPRATNCRKTKCGHTNNLRPKKKLK

SEQ ID NO: 734 - protein, 879 aa, Phyllotreta cruciferae
MSSFKRDKKEEEDGVGNIFQNIEKTTVLQEARVFNETSVNPRKCTLILTKLLYLLNQGEALNVKEATDVFFAMTKLFQSKDVILRRMVYLGIKELSSTADDVIIVTSSLTKDMTGKEDIYRAAAIRALCSITDATMLQAIERYMKQAIVDRNSAVSSAALVSSLHMTKMAPEVVKRWVNEAQEAINSDNVMVQYHALGLLYHIRKTDRLAVTKLIAKLTRTTLKSPYAVCMLIRIIAKLLEEEDSNNDFPYFDFIESCLRHKSEMVVYEAAHAIVNLKRTTSKELAPAVSVLQLFCGSPKATLRFAAVRTLNQVAISHPAAVTACNLDLENLITDSNRSIATLAITTLLKTGAESSVDRLMKQIASFVSEISDEFKVVVVQAIRALALKFPRKHNTLMNFLSAMLRDEGGLEYKASIADTIITIIEDNPEAKESGLAHLCEFIEDCEHVSLAVRILHLLGREGPKTKQPSRYIRFIYNRVILECPSIRAAAVSAMAQFGASCPDLLENIQVLLARCQMDSDDEVRDRATYYSSILNKNDKNLYNNYILDTLQVSIPSLERSLKEYTQSPTNQPFDIKSVPLQVGPSPDEREKKHKSEGMLTSQGPLRPPPVSREENFAEKLSAIPGIQQLGPIFKSSEVVELTESETEYFVRCIKHCFAHHVVLQFDCLNTLADQLLEDVRVELEPSEGFELLSVVPCKQLHYNETNHTYAILKFPDDDLPSCVGTFGAVLKFIVKDCDPTTGIPDSDEGYNDEYILEDLEITLGDQIQRVSKVNWGAAWESAAEGSVEKEDTYSLSSMNTLDEAVKNIVQFLGLQPAERTDKVPEGKSTHTLLLSGVFRGGIDILVRAKLALADGVTMQLTVRSPDDSIAELITSSVG

SEQ ID NO: 735 - protein, 427 aa, Phyllotreta cruciferae; identical to SEQ ID NO: 433

SEQ ID NO: 736 - protein, 219 aa, Phyllotreta cruciferae
MSFFSKIFGGKEKDVGPTPGEAIQKLRETEDMLYKKQEFLEKKIEEYTLVAKKNASKNKRVALQALKKKKRLEKTQLQIDGTLTTIEMQREALEGASTNTAVLDSMKNAAEALQKAHKNLNVDDVHDIMDDIAEQHDIANEITTAISQPVGFADDLDEDELESELEKLEQEGLEEDLLKVPGPTELPAVPTGAIAKPVKPAAKKVEDDDDMKELEAWAS

SEQ ID NO: 737 - protein, 202 aa, Phyllotreta cruciferae; identical to SEQ ID NO: 435

SEQ ID NO: 738 - protein, 216 aa, Phyllotreta cruciferae
MATNRSGTAQRPNGATQGKICQFKLVLLGESAVGKSSLVLRFVKGQFHEYQESTIGAAFLTQTICLDDTTVKFEIWDTAGQERYHSLAPMYYRGAQAAIVVYDITNQDTFGRAKTWVKELQRQASPTIVIALAGNKQDLANKRMVEYEEAQTYADENGLLFMETSAKTAMNVNDIFLAIAKKLPKNEQTSGQGGSAQGRRLAEGDAGAKAPGNCCK

SEQ ID NO: 739 - protein, 182 aa, Phyllotreta cruciferae; identical to SEQ ID NO: 395

SEQ ID NO: 740 - protein, 1684 aa, Phyllotreta cruciferae
MTQQLLPIKFQEHLQLTNAGINAANITFATLTMESDKYICVREKVGETSQVVIIDMADTANPIRRPITAESAIMNPASKVIALKGKAGIETQKTLQIFNIEMKSKMKAHTMSEDVFFWKWISPNTLALVTETSIYHWSMEGDSIPQKMFDRHSSLNGCQIINYRTDPKQNWLLLVGISAQQSRVVGAMQLYSVERKCSQPIEGHAASFATFKMEGNPEPSTLFCFAVRTLQGGKLHIIEVGQNPAGNQPFPKKSVDVFFPPEAQNDFPVAMQVSTKYDVIYLITKYGYIHMYDIESGTCIYMNRISSETIFVTAPHESTGGIIGVNRRGQVLSVSVDEESIIRYINTVLHNADLALRLATRNNLAGAEDLFVSKFQMLFQNGQYAEAAKVAANAPKGILRTPATIQMFQQVPTQPGQNSPLLQYFGILLDQGQLNRYESLELCKPVLLQGRKQLLEKWLKEEKLECSEELGDLVKQADPTLALSVYLRANVPAKVIQSFAETGQFQKIVLYAKKVSYTPDYVFLLRQVMRTNPDQGAAFAGMLVADEEPLADINQIVDIFMEQNMVQQCTAFLLDALKNNRPTEGHLQTRLLEMNLMSAPQVADAILGNNMFTHYDRAHVAQLCEKAGLLQRALEHYTDLYDIKRAVVHTHLLPADWLVNFFGTLSVEDSLECLKAMLTANIRQNLQICVQIATKYHEQLTTKSLIDLFESFKSYEGLFYFLGSIVNFSQDQEVHFKYIQAACKTGQIKEVERICRESNCYNPERVKNFLKEAKLTDQLPLIIVCDRFDFVHDLVLYLYRNSLQKYIEIYVQKVNPSRLPVVVGGLLDVDCSEDIIKNLILVVRGQFSTDELVEEVEKRNRLKLLLPWLESRVHEGCVEPATHNALAKIYIDSNNNAERFLKENQWYDSRVVGRYCEKRDPHLACVAYERGQCDRELIAVCNENSLFKSEARYLVRRRDGELWAEVLQETNPYRRQLIDQVVQTALSETQDPEDISVTVKAFMTADLPNELIELLEKIVLDNSVFSEHRNLQNLLILTAIKADATRVMDYINRLDNYDAPDIANIAINNHLYEEAFAIFKKFDVNTSAIQVLIEQVNNLDRAYEFAERCNEPAVWSQLAKAQLNQGLVKEAIDSYIKADDPSAYIDVVETASKNNSWEDLVRYLQMARKKARESYIESELIYSYAKTGRLADLEEFISGPNHADIQKIGDRCFDDKMYDAAKLLYNNVSNFARLAITLVHLKEFQGAVDSARKANSTRTWKEVCFACVDAEEFRLAQMCGMHIVVHADELQDLINYYQDRGYFEELIGLLEAALGLERAHMGMFTELAILYSKYKPARMREHLELFWSRVNIPKVLRAAEQAHLWAELVFLFDKYEEYDNAVLAMMTHPTEAWREGHFKDIITKVANIELYYKAIQFYLDFKPLLLNDLLLVLAPRMDHTRAVAFFTKTGHLQLVKSYLRSVQNLNNKAINEALNSLLIEEEDFQGLRTSIDAFDNFDNIGLAQRLEKHELTEFRRIAAYLYKGNNRWKQSVELCKKDRLFRDAMEYTSESRNQELAEELLAWFLDRKAYDCFSACLYHCYDLLRPDVILELAWKHNIMDFAMPFLIQVTRELTTKVEKLEQSDAQRQSEAAEETNKPIMMPEPQLMLTAGPGMGIPQQQYIPQQTYAQVGYAPQMAYQGYPGM

SEQ ID NO: 741 - protein, 1223 aa, Phyllotreta cruciferae
MLTKFETKSARVKGLSFHPKRPWILASLHNGCIQLWDYRMCTLLEKFDEHDGPVRGICFHSQQPLFVSGGDDYKIKVWNYKQKRCIFTLLGHLDYIRTTMFHHEYPWIVSASDDQTIRIWNWQSRTCICVLTGHNHYVMCATFHPSEDLLLSASLDSTVRVWDISGLRKKNVSPGPSGLEDHLKNPGATELFGQADAVVKHVLEGHDRGVNWASFHPFLPLIASGADDRQIKLWRMNDSKAWEVDTCRGHYNNVSCVLFHPRQELILSNGEDRSIRVWDMAKRTCLHTFRREHERFWVMTSHPNLNLFAAGHDGGMVIFKLERERPAYTVHGNLLYYVKEKYLRKLDFTTSKDVPVIQIRGGGKIPVYRMSFNPAENAVLLSTRTSNLDNSTYDLYMIPKDQEREDHVPEAESKRSSGLTALWVARNRFAVLDRTHQLIIKNLKNEVTKKVQTPTCDEVFYAGTGMLLLRDSEHVTLFDVQQKRTLAQVKISKCRYVVWSSDMSHLALLSKHNVTICNRKLDVLCSLHENTRVKSGAWDDSGVFIYTTSNHIKYTLKNGDHGIIRTLDLPIYITRVRGSQVFCLDRECKPRLLVIDPTEYKFKLALINHKYEEVLYMVRNSRLVGQSIISYLQQKGYPEVALHFVKDDKTRFALALECGNIEIALEAAKALNDKNCWDQLAQAALWQGNHQIVEMCYQRTKSFEKLSFLYLITGNLEKLRKMMKIAEIRKARSSQYHAALLLGDLEERVKLLKASNQLSLAYLTAATHGMRDEAEQLKEQIGDDKKLPDVDPNAKFLKPPPPIQQAESNWPLLTVSRSFFENTAAAATASANMKSLMAEPVSDVGMEDAQGWGDDDELELDPDEKKAEVAAAGGGDGEGGWDVEDEGLEIPDLGPTATVEAEGNFVHLPTQGPSALITWTKNSQLVADHVAAGSFESAARLLHDQLGVVDFRPFESLFLNLYSTSKTVSSWQQNVPPLFSYPSRNWKEANLKNQLPASGVKLNDLVAKLQICYQLTTGGKFTEAIEKLQTLLLSVTLLVVDNKQEISEAQQLLRIASEYICGLQMETLRKTLPKTSAEEQKRQCEMAAYFTHCKLQPIHQILTLRTALNMFFKLKNYKTAASFAKRLLELGPRPEVAQQARKILQACDSNLTDDLQLQYDEHNPFNLCGHSYTPIYRGKAEEKCPLCGTSYLPKYKGVLCNICKVAEVGKDTIGLRISTHQFR

SEQ ID NO: 742 - protein, 181 aa, Phyllotreta cruciferae
  misc_feature (160)..(160): Xaa can be any naturally occurring amino acid
MGRYAREPDNAAKSCKARGSNLRVHFKNTCETANAIRKMPLKRAVAYLKNVVVQKECIPFRRFNGGVGRCAQAKQFGTTQGRWPKKSAEFLLQLLRNAESNADYSGLDVDRLVVEHIQVNRAACLRRRTYRAHGRINPYMSSPCHIELWLTEGESSPEAXLRRATKRRQRRRRDPSRPLLQ

SEQ ID NO: 743 - protein, 104 aa, Phyllotreta cruciferae; identical to SEQ ID NO: 441

1. An interfering ribonucleic acid (RNA) molecule wherein the RNA comprises at least one dsRNA wherein the dsRNA is a region of double-stranded RNA comprising annealed complementary strands, one strand of which comprises a sequence of at least 19 contiguous nucleotides which is at least partially complementary to a target nucleotide sequence within a flea beetle target gene, and (i) is at least 85% identical to at least a 19 contiguous nucleotide fragment of SEQ ID NO: 253-378 or SEQ ID NO: 616-701, or the complement thereof; (ii) comprises at least a 19 contiguous nucleotide fragment of SEQ ID NO: 253-378 or SEQ ID NO: 616-701, or the complement thereof; (iii) comprises at least a 19 contiguous nucleotide fragment of a nucleotide sequence encoding an amino acid sequence encoded by SEQ ID NO: 253-378 or SEQ ID NO: 616-701, or the complement thereof, or (iv) can hybridize under stringent conditions to a polynucleotide comprising the nucleotide sequence of SEQ ID NO: 253-378 or SEQ ID NO: 616-701, or the complements thereof, wherein the interfering RNA molecule has insecticidal activity on an insect pest, wherein the insect pest is a flea beetle of the Alticini tribe.

2. An interfering RNA molecule of claim 1, wherein said insect pest is a flea beetle is a species of the Phyllotreta or Psylliodes genera.

3. An interfering RNA molecule of claim 1 wherein the RNA comprises at least two dsRNAs, wherein each dsRNA comprises a sequence of nucleotides which is at least partially complementary to a target nucleotide sequence within the target gene.

4. An interfering RNA molecule of claim 3 wherein each of the dsRNAs comprise a different sequence of nucleotides which is at least partially complementary to a different target nucleotide sequence within the target gene.

5. The interfering RNA molecule of claim 1, wherein the interfering RNA molecule comprises SEQ ID NO: 253-378 or SEQ ID NO: 616-701, or the complement thereof.

6. An interfering RNA molecule of claim 1, wherein the dsRNA is a region of double-stranded RNA comprising substantially complementary annealed strands.

7. An interfering RNA molecule of claim 1, wherein the dsRNA is a region of double-stranded RNA comprising fully complementary annealed strands.

8. An interfering RNA molecule of claim 1, wherein the insect pest is a flea beetle selected from the group consisting of Phyllotreta armoraciae (horseradish flea beetle), Phyllotreta cruciferae (canola flea beetle), Phyllotreta pusilla (western black flea beetle), Phyllotreta nemorum (striped turnip flea beetle), Phyllotreta atra (turnip flea beetle), Phyllotreta robusta (garden flea beetle), Phyllotreta striolata (striped flea beetle), Phyllotreta undulata, Psylliodes chrysocephala, and Psylliodes punctulata (hop flea beetle).

9. A nucleic acid construct comprising the interfering RNA molecule of claim 1.

10. A nucleic acid molecule encoding the interfering RNA molecule of claim 1.

11. A nucleic acid construct comprising a nucleotide sequence that encodes the nucleic acid molecule of claim 10.

12. The nucleic acid construct of claim 9 wherein the nucleic acid construct is an expression vector.

13. A recombinant vector comprising a regulatory sequence operably linked to a nucleotide sequence that encodes the interfering RNA molecule of claim 1.

14. A composition comprising two or more of the interfering RNA molecules of claim 1.

15. A composition of claim 13, comprising an interfering RNA molecule which comprises at least one dsRNA wherein the dsRNA is a region of double-stranded RNA comprising annealed complementary strands, one strand of which comprises a sequence of at least 19 contiguous nucleotides which (i) is at least 85% identical to at least a 19 contiguous nucleotide fragment of SEQ ID NO: 253-378 or SEQ ID NO: 616-701, or complement thereof; or (ii) comprises at least a 19 contiguous nucleotide fragment of SEQ ID NO: 253-378 or SEQ ID NO: 616-701, or complement thereof.
